United States Patent Application Publication US 2008/0039413 A1 - sequence listing, part 19

SEQ ID NO: 2462 - DNA, 198529 bp, Mus musculus
  misc_feature (1)...(198529): n = A, C, G or T/U
tatagctcatgctgatctctaacttgctgtagagccaacaatcctcctgtttctacctgccaagtgctgagactgcaggtgaggctccgtgctcaggttttacccggtgctaggaaccaaaccttgggctccatgtatgccaggcaagcactctaccaccagctgcatccccagcccctgctttcaatgatcatttgctcctgcatagactggggtggagaacagagagctcacttggtcccagagtccacacaagcctgagtgtttagagaaccagcgattttatcatttaatgtggggtatctagttaccccaagggtgccctggctgccacattaagggaacagttgttggggtttccacccagtacacactgcctcctcagtagcatcgggcacaggcaggctcttctacaatcccatccttccccagccttggctctctccgccctctggacatcctaccttgacccatgatggtggcatcatatgtcacctcttctcccgtcctctcacaaccacctttacctcggatctttttcctgtactatttaatgcttccctcaaggaaggttcccgtaggtgttctctcttccctctggccctccagccctaggatactgcaagtcaacagctctgtctcttcctccactcgtccaagttttctctcagctcataggctaacacagaagttcctatctttcttgctgaagtcacacacacacacacacacacacacacacacacaccacacccttaaacccactattatcctctggacagccatctcagcttcccactacagggagatggacaaccatgtcccagttttctctgcagatgctctcagttgtctgtcccaccatgcctagcaaaaaaaaaaaaaaaaaaaaaaaaaaaaaacctatcaaggttctctaaattcagctctgtttcatcacatccctatgactacacagatatgtttccagaattttctccctggaaagaagaggttagacaacatctgttctcttcctgatatcaaaacaaaattgatctcaccaaagtttacgccaggaagcaagtgtgtttatcaggattacttacagaccatgggcaggggttactgccaggagtgggaatgaccttaaaggagccaccttacaggttaccatggttgtgtggatggctctcctagtcttcccagcctatgtcctccaggccctccccgagagcccaagactatgtacaatcagggcagaattacctacaactcaggggaaggtccttctactcagcacacccagctgagataatccttagtgagcagtgtttgtctgagaatagacctgtccaacagcacgtcagttcccaacctaaagctcttcactctctctccacatcccaagaccctttctgaaacccagttccgcttccagttattgagatgcgctttggtgggtctgatgttcatcccatctacaaggttggcacttctgcatctccatgtattagctccttaggtagagcctcccatctaactaattcatcatacatcctgataatcctgcatccacttcatgtcccatttcccgaaccaatcataggttagccttgtgtgtatcacattatctgcctcctctctgagaatgaaaggaccataagaggcaggactgtacctgttggggtcatcattcagacagctgttgcatgacttcctaggaagatgtgagcaaacatcagctcacttcagacagcacatagaagacaggacacagaagacaggacacagaagacaggacacagaagacaggacacagaagacaggacatggaagacaggacacagaagacaggacacagaagacaggacacagaagacaagacatggaaggcaggacacagaagacaggacacagaagacaggacacagaagacaggacatggaagacaggacacagaagacaggacatggaagacaaatcaaagagtctaacttgcaaagccagtgaacttttatggggatgcttgcaggagagtaagtcactaaagacagctgcctcactggaacacctaccttagcctgggtgtggactcacaaaagctgtatccctgcaatcctgcccaacatgcagccaatcccactgaagagtctcctttttccagcaactatttcttcttatagaaccttgggttgtttaaaaaaaaaaaccaaaataacaaaaaaacaaaaacaaaaaaactttagctgggcagtgtgctcacgcctttgatcctagcacttgggagtcagaggcaggtggatttctgagttcgaggccagcctggtctacagagtgagttccaggacagccagggctacacagagaaatcctgtctcgaaaaaaacaaaacaaaacctttattatttacatttatttgttttatgtgtgtgaatgctttgcctgcagatagggttgtggaccacatgcatgcagtgcctgcagagtctagaagggtgttggatgccctgaaccggagttacagatggttgtgagcctgtgtaggtcctgggaatcaaacctaagtcttctggaagaccaagtgctttaaaccactgatccatctcaccagcccatttttaacttaaagaaaaactgtttgtttgtttgtttattgtgtctgtctgtctatctatatgagtatgtctgtgtgtacatgtgtgtgtctgtgtgtatatatgtatgtgtgcacatgtgtatgaaagtttgtatgtctgtatgtatgtgtgtacatgtgtctgtatgtgtgtgtatgtctgtatatatgtatgtatatgtttgcctgcatctgtgtgtgtgtgtctctctctctctctatatatatatatatacatacatatacatatatatgtatatgtctgtgtgtatatatgtgtatatacacatttgtgtatatatgtgtgtgagtgcatttttgtgtgtctgtatgtataatatgtgtgcctgtgtgtgtgtgtgtatatatatatatatatatatatatatatatatatatatatatatatgtatatatatatatatatgtgtgtgtgtgtataaaattgtatgtctatacgtatatatgtttgcctatgcctgtgtgtgtctatgtatatatacacatatatgtgtgtgtatctgtgtatatatgtgtgtgtatatgtgtgtccctgtgccatatatacacacacacaaatatttgtatgtaatgtccgtgtatatatgtgtgtctgtctgtgtgcatttttgtgtgactgtatgtatatatttgtgcttgtgcattggtgtgtgtgtaagtcagaggacagctttctggaattgtttcattccttccacatatgagttcctgggaactgaactcgcacagtcagacttggaaggaaatccctttctaattgagtccttgtcttagggttttactgctgtgaagagataccatgaccaaggcaagtctttttttttttttttttttttttttttttctttttcgagactgggtttctcttttagccctggctgtcctggacaaggcaaatcttataaggacaacatttaattggggctggcttacaggtccagaggttcagtccattatcaaggtagaagcaaggcaatatctttttatttaaagatttatttatttattatatgtaagtacactgtagctgtcttcagacatatcagaagagacagtcagatctcattacggatggttgtgagccaccatgtggttgctgggatttgaactcaggacttttggaagagcaatcgggtgctcttacctgctgagccatctcaccagcccgcaaggcaatatctaagcaggcatggcgcaggaggagctgagagttctacatcttgttctgaaggcaaacagtcttacagccacaaagacacacttcctactccaacaaggccacacctccaaatagtgccactccctgggccaagcatattcaaaccagcacagccatcttgccctaactctgtgatcgtcctgaggcttgtaagcatcattgatttcctgagtcctctgagcttccttctttgctccacaagaggaatttccaagcaggagcgcacagctatgcactagcctgatctaatatgtgctacaagcaggcacacacacaccaaacagaacattgtgggatgggagcccacagtactgtctaggctggtatccggctcctggcatcaagtaagcctatgctttggtctttctggccctgaaacctcggccctgagagttccaagcccagctgcacctatttcttttcatctcttcagctgtcagttcaaactgctctcccatgggctgcaaatcagcaaacagaactcccattggctgtgagtcaggtgccgttttgggtgctgggaattaaatgaacacacaaacaggaatcccagtgtcttacctctacaccacacttcatcttgttctcttacttctcctggcatctctttgatcctacgagatgggaactgggagatgaaagactccatgtttcacctggtccagttcatcagcctgtttgatagaacagagccccaggtgcttggaggggttctgtatgctggggtggcttccccctccttgtctcattctttctattcctaactcttccttccctcctatggggtcactttcttaaagaaacaacttatcgttaactgttcttcagtcctgattctggagcccaggctaacacaggagcagccttattaagtcattttctgcatttttacctggggtcccaggttgtactgcaggtttttaactaatatagagcaggtactttttttttttgcattttatctgagttactacctcagatcctggaaagtatcaaatgtgctgatttctttcgaaacaggatcttactatatagccctggctagcccagaactacaaaaagcaagtggtctctaactcagaaagatcctctggcctctgcctcctgagtgctgggattaaggtctgcccggtgttctgcaaagctgagacctaccaggacaattaccatttccacctgccacctgcttcctccatgctggggaagggacaccagctccttctcatcagggacaggatccttgtgtgtactttggcgctgggaaccagatgtcagggccctgcccgtagaacaaggttgcagacaatggccaggactgagtgaccaacctcaaggctgcagacaatggccaggactgagtgaccaacctcaaggctgcagacagtgaccgggactgagtggccgacctcatggatctgtaccagcttggcgtctcgtgactgtaggaagcaagtctcagacagctggtaaaaatgcaggaacataggacagctgcagttatgggctgaccactaatttgatgcttctgtggttctacgccacttttctgcccgcagtttcctgcaaatgagaggtgtccagacttgtgacatgatgttgtcatctacaaagtttgtgctctagcacaaccaacttaaaaaaaaaattaaactgaaaaaaatggtaaagatgccttattttaaagtaagttcaccactttgtgttggccacagtcaaggctaccctcagctgcacatgtccacaatgaagaggcgtgtacacaccagaaggggctgaaagaacacctctccccaactggctgtatgtttttaagtctagggtttattttattttcatatattttggtcatattctccccccttggactcctccaagatccttctccccacccacccaatttcatattctttttctctctcaaaccaaaccacacacatgtccacacacactcacactgacagtgtgtgcggcacgctcgtgtgcacacacgcggagccagttttgtgctggctaactgcttctgatcaagcatcctgccctggagtgtggttgatatacgcagcgacactccagatgagaaaaccgaggttccctttgccagcgggtacggactacttgcttcttgatcgggatgggagcctgtgtttgcttccctctctgggcgtcgggactgtttcaggcttgagcctgtgcaggtcttgtgcttcctgccacggtctccgtgagctcatatgtacaccagtcccatcatgtctggaagacaccgtttcctcagagccacccatcacgctggctcttaacaatctctctccccttctctgtcacacaaacccttgagcctccaggagaggatatgacacagaaatcccacgcaggaccgagtgctctgaagtctcttgctctctgcacactgtccagctatggtctccgtgttagtttccatccactgcaagaaggaccttctctgatgagggtcgagcagggtgctaccctggatcccagtcaggcatggtggctgtgggattcctgacagagagagtcatcctacagtgaaggggagtcaggaatggctgaaatggcagtgggaaaaaaccagggggccctggttccacacctcaaacttcgattacttcccaagggaaaggagatggattaggccagatgacggttcttaacttccagaaccagaaggcgttggatctactggttttacctcagacaatctgcccctgcccctttaagacttcaggttgtatgcaggaccattcctactgaatactgggtactgaagctggtccctctcagattgcttgttctagatcctgccagcctgccatagtctatcaaacctggcatatatctgatgatttaatctgtgtgactgaaatcccattgatataattgcacatttacattcttttttttttttccattttttattaggtatttaactcatttacatttccaatgctataccaaaagtcccccatatccacccacccccactcccctgcccacccactccccctttttggccctggtattcccctgtactggggcatataaagtttgcaagtccaatgggcctctctttccagtgatggacgactaggccatcttttgatatatatgcagctagagtcaagagctccggggtactggttagctcataatgttgttccacctatagggttgcagatccctttagctccttggctactttctctagctcctccattgggagccctatgatccatccattagctgactgtgagcatccacttctgtgtttgctgggccccgcacatttacattctatcataaaaaatataatgttttgttacctgctgctgtggtatgcatctgtaaccccagcacttgggaagcaggggcagagtgaccacttcaaggccagcttgggctgtatgagatggtctctaaaatccaaaaccacccaaccacctcaaacccaaaactgggctgagagatgactctcagtggtcaagtgtagactatgtaaacctataacctgagcccagatcccagtactccctaaaaggtcaggcatgatggcatgtgactgtcataacagtgctgggggcagggaagggcagagatgggctcattctgaaggctagctagctaggcagtctagcttcatcagtgagtgaccccaccctccaaggctcaggggacatcccagaagaggggcagacaggacgtaagagctggaggatggagagggggctggctgtgaaacattgtcttctgcacgtggcacgactgtcactcacagggacttgcaccggctctggtcaccagcacaagacgaagatggacagaagtgggcagagatgggacagattaaatccaggccccaccccttatgtaggagcctccggcagttgatagttgctggggagtgcaaatggtaccatgctccagtggatgcttcacacccaggacatagagcagccccgatgcattaactgggttgctgggggaaaagacatgaggtcctgaggggaatgtgctgggtggccatgtcgggtaggaagtgtgaaatgggcacaaccatagtacattgtttacatgtataaaattctcaaggcagaaagagtaaggtggagagcaatagaagacacctaatgtcaactcctagcctcccagtggggccatgagtacacgcccagacatgtacacatacatacaatgggcattctccaaacacacatgcacacacgtgcatacacacactcacaagcacataggtgtacacacacacatgtgcgcacagacacacacagagacacacagacacagacacacagacagacacacagacacagacacacacacacagacacacagagacacagacacacacagagacatacacacacacacagacacagacacacacagagacccagacacacacagagacacagacacacacacagacacacactcacactgtccacctggcctccgctcttatttgatgttttggagaactcttctatttagaaagaacttcaaacccataaaagatactctagaggctggagagatggctcagcggttaggagcactgactgctcttccagaggtcctgagttcaattcccagcaaccacatggtggctcacaaccatctgtaatgggatcctatgtcctcttctggtgtgtctgaagacagcaacagtgtactcacataaaaaaagaaaagaagaaaaggaaaggagagaagagaagagaagacaagaaaagacaagacaagacaagagaaagatactctagaacccagcactgagactcgttgataatgtttggcccatccagtttctcccttgctcccatcaggatgcctcttccttcccaaatcatctgaagcttttgccccttaagtcctaatgatgacagtcttgactgcacataataaattcaacccagtattttaggccgtacagtgcagatttcagtctggtcagctggaatgttctgcacaccacccagtgcagcaaaggcacaccatttagccgcagtcagtcagccctcccattcccgacaggtttcatatctttaagtttcatgtgtgtgttttttatggcatggggattttgggacacagctcatccctctttaataaatgtagctcataatgggtttactgaaacttaagtctcctaggagtaccgggtagagtagggttctaaggacgatgcccacctctcaccagaggtcaacgtgtcccccctactgtgctttgaatgggcattctcactccccctgtccaggtgtcgctgagagaaagtctgtggagaaatgggctagctcaagcaaatatctagtgaccaatgcccccctcccccaactctcagtgagcattcaaggaagattttgcctggacaattttcctgttcagttcctatctagtcctgaaatgtggagggtctggaggggtttattttctcctcatcttcggttcaggttgggtctctccaagtgcgtccagtgtcccctgtgacccgtaggcagacagcgtaggctgggccatgttaaccagtctgcatgttatttgcttccgggagggtttctttgtcctttctgccacctccaccagctcctcatttgatggcattgccctcatggctggtccatggccccctcctgcgtcgttaactctgtgcttgactccggggttgataccccaagaccacagcgctggcagtggggtccccaagccgccccagcgagcggtcccggcgcacgctccggggtgccaagtgggtcagagctttgggggtctcggagcctctcgctgcggggaccgaggacggtagcgctcgaggactgtcgcgcaggtggcggccgggcgaggaggnnnnnnnnnnnnnnnnnnnnnnnnnnnnnnnnnnnnnnnnnnnnnnnnnnnnnnnnnnnnnnnnnnnnnnnnnnnnnnnnnnnnnnnnnnnnnnnnnnnnnnnnnnnnnnnnnnnnnnnnnnnnnnnnnnnnnnnnnnnnnnnnnnnnnnnnnnnnnnnnnnnnnnnnnnnnnnnnnnnnnnnnnnnnnnnnnnnnnnnnnnnnnnnnnnnnnnnnnnnnnnnnnnnnnnnnnnnnnnnnnnnnnnnnnnnnnnnnncccggggcccactcggcccccgcccccgcgcgcccccggcccgtgacacgcgcgtgaagagccccggagcatcccggatcgccgggcacccgcctacgctgagcctcgcagtcccgggaacgtgagccactggcggccggggccgggccgacaacgaatcggagcagcgacaccggccccgggaccgcgcccgccgcccccgcgcctcctgcgggtaagtcgctcgagctccgggcctgcggctggggagggcccccggctcagctgctccccggtggcacctgcaggacccgggacacccggaaaggtgccctaaggccaccgtgtcccgccgcgccgcatgtactccagttctgggccccggcagcctcggtgacagtctggcgaccttcagagagcccggggccggagcgcgcgcagcacccacattcccactcgccgcccgaacttcatgtaaatgacgtcgtgcgcctagggaccccccctttctatccttgagagtgaaggagttcactttgggtcacttcttttacttctgttgtacaattctgtgtcgtctccaaggtcagcctcttgagggtaaaaagcaaatgtcaggacaaacaaaattttcggttttgttaagggaagattttttttaagttccctggcgctcccccagcaaatcctcagccttagaagcagttgcctgtgcttgctcagacagactttttactgcccactttgagcagaagaatggatgctgaggcctctgggggttttttcttgttgtttcccgatttgcttcgcaaactttgaaactctgtgtaaggttgaccgtactgtctgtagagggtagccaggatacatgttcttttcctgcatggttttctagtcttgggaaggtggaaggaagccataaggaaacagactaggcacagggtcctttccaatttctaactaccagaacggtcaagagggaggagggcagcttgagctctgagcagcctccagcgcccctgtgtatgtgtgtatgtgtttgtgtgtgagcccgcgcgcgcatgggtgcagtggggcggtctccctgttggggtggagatgacaggtggaggtggacctgggcgacagacagctgccttcccctttggtctctcactaaaggctgcagcctctgtgacctctgactccagcttgctcacagagaagcccaggccaagtggagaaacagctgcagatcagagctgggcccagggggatgctaaactgactttcaacgctcaggtggaggcatagcaggtttgccaagggtttgccaagggctgggttgccgttggccgcttggcaaggcaccaggtccatttcctgtttgatgcccctgggacggttggggtctgatttcctgcgcagagctgagctccaccctcctgaggtaaggacgctggtcttggagtggaaaagatgagattcacagcctctgcagactgtgtgaccttgcccctaccttagccagtcttacctgcctgtcccatgtatcctggtccctcaaactcaactggaccaatggaaggaatacagagttagtggttttgttcgttagtttgtttgctatgaaagtttataggtcaatggagggctctcaggtctgactgagcttgtagtgttgtaacttttgaaaagtcctggtgggaataattaagtcatattatggtaatgataacttttataggtttatagtctatgtcaagtcaggctttgacagtgacaatggctcatgattcacagtgaaaggggtttcaaactttcagtttccaaatggctgcgtctgtttgtcgtgagccgttgaatgaagacttctttctcgccagtctgaggctgcctctggtcttgcacacccggcgtcctcttcgttgctggatggttctggcacaagccacctgcgctccccgaccttgacctccagctcccaggtgcagagcaggcctcctgctcctctaggcttgggcactttataaaggcctaattgttgagttactccaggcatctgataagacagtgggtgagcgggcaggttccgtaagggaggcttggatggtgaggcactcttttaaactcactataggttgtagacacacaatcagacctttttcgttttctcttattaccgtgtgtatgacaatgtctagaggtcagaggtcaactccacagagtggcgagtcttccctctcaccttcttgagggctccccagatggagccctccacacacaggcctttgaagcacttttggtctctgccctacaagcttgacaaactcgaggacattgcagtggccggcatctccaggctgagcctatgccccatgtgtttgaaaacggagggacaaaggatgctctttttcagagatattagaagacccgtctccacgggaagggccgcagggatcgtcaacttcactttgccgtctggggttaagtctgccgggtgggatgaatgagtgtcctggctccgcctctgtcttctttctttctgaacaatgatcctcgatccagcttgccctcttggggggtgggtatccaagtgggggtcgctttcagtcttgaaaaggtccgtctaagcatgtggtgtacgtgagcgccagcacgtttatctgaaggtctaggccggactttgctttctctgaatggctgtgtggcaccgctgatggggaagcttgcttacttagagagctgcggctagtgcaccagagaccaggtgagatggtgtgtgggcatctcagaatccttgtccaggctttgggccagccggaaagctcccaggccacctgttccaaaggcctcatcgttctaagaactttacaaggtgcagctttctgactgctgggggcagtggcttctcaggtggctgctggctataaacagtgtcacactgcaaagtggcttatcttgatgcttctaattcattcctgtggccttcaaggctcaagaagttggcagagggtctgggagcttagccgtggcctctgatgcttttctgagttaatgattactgtgatgaagaccagaaaatagaattcaggggtttttttttttttttttttttttttttttttttttttttggtgggtctgaggggtagggagggtcttgtgcagtccaggctgacagcagacttgctatggagccaaggttaatcttgaactcctaatccctctgcctccacctcccaagggctgggatacaggcatatgccagcacactgtgtggatttgtcctgcttgctatttgagaatgtcattatgttgctctaagctagttgtcactcctggactcaaggtgctccagcctcagcctccccgctgcagggaccacaggccagagccactgcacccagccaggactcttcttgctttgaagtaaaggtactttaacatctgaattgagaagggcttacagaaaatgcatcctgccttccccaacacctgaaagctgtgccctggaggctcaggcatttgcacactggttcccaggtggtggtgctgtttggggaagtttactcagtgaggccttgcaggaggaaatgtgtcactaggggtgggctctgtgtcccacttcatccggttccttccctgttttgtgcttacggttgaaaacgtggcctctcggggtccccatctcccaccatgcttgcccttccccactcacctccccgtcagggatgggattcttagcctcctgtgtgtcagtcttccttcctacgttgaccctggagagtgatgcatgcacactcccagcctgagaggcccagaggcggctcatttccaggccgtcctcgggctctagatgtctggcgcatcaggacattcaagagcagaagagagttcaccagagagagtgttgtgccaagccggaagtggacactgtgaataactagggatgtcagagtagccaccacaatataaatgacctggattgccgagttagaccgtgctgcgtgtgtccgggagactgtaaaccaacctttccccctgctcagtcttggcttctctctgtctctctgcttcctctcatcttctctctccttctccttctcgtctttcttaagaatcagggatgagtagatggctgagatcagtaaagtgcgactcgtgcttcatccacgcgtggtggcctcagatgatcattctgggtcatctgggtcattttgggtcacctgggtcattctggcactgaggcaggatagataaatggatccctggggctctctggccaatcagttcagctcagttgttgagctccacactagtgagagacccttgtgtcaagacgcgaggcagacagtttttaaggaatgacccttgaggtcgtcatctggcctccatatgcacacgcatgtacccacgtgaacacacatatgcacatcatccatacactaacattaaaaaaaaaaaagagagagagagtcagttggagatagccccgaatgtgagaactgtacgacttgaccgtatcttctgaactttgtgccctcaccttacccactcttcccggtacctcagtgtcactgttctcagccttgattcctggactttagttctagataacccgatcatgttgattgaaatatgcctccatcctctggcaggtttacggggacgagctgacgggaatcccacactcactgtgttgcttcaaagcgatttatatctgtaatatcactattagtcagactttggatttgaagagcctgtctacacaggaggagccactgtgttatagactctgactttcccggttggttggtggaataagggagcccttttaggcagctctttcttttttcttttttcttttttttggtttttcgagacagggtttctctgtatagccctggctgtcctggaactcactctgtagaccaggctggccttgaactcagaaatccgcctgcctctgcctcccgagtgctgggattaaaggcgtgagccaccacgcccggctaggcagctctttctaagcaagaatatgtgtggtgggacccgacaatttgctccatcgaacattctgggagaggtcagggtcttatttagttttaaaagctatgtgtgtatgtttatctctgtgaacttgctcatgaatgcagtacctgaggtggtcagaagagggcgttagagtccccccagagctgaagtgtcttggccatttgatgtggatgctggggtctgagagacctagtctcctcctcctcctcctcctcctcctcctcctcctcctcctctttttttttcagtttttcgagacagggtttctctgtgtagccctgactatcttggaactcactctgtagaccaggctggcctcaaactcagaaatccgcctgcctctgcctcccaagtgctgggattaaaggcatgtgcaaccattgcctggctagacctagtcttctgtaagagcaacatttgttcttaactgctgagccatctctccagcaccggcttttagaaaacagtacagcccgttggcctcatacaggctcacctctatcctgaagaaattatttccggtttgggatgtggccaaagagaagaagtctctctaatgctagatgtagtttggcctcacttggctgaggtgtttatgtgggggtgtgggagctgtcccagacttgcttgtctgaagatctcaggagacttctctgggagtagggacagagtcttctaagctgcaggagtgtcagccgtcttcccagggataagtccaagctgagagacctcatctgtgccaagaagctaagagctctgcttcacggtggcaggaggcggttgtgtcctgaggaggagcagcttaagagggtagtacttaatggggggaacttagcctccactgttttctgtgtaaatttcggtccctgttgtagtggcacaggcagacctcaggaacatagagggttcatttctcagaatggggccagggcggggggcatcttggtcatagttgtcctcgattgctgctgttaccactgccatcaccaccatcaccaccaccaccaccatcaccttcatcctgtcaacctggagacttcttagatctgcagaatattagccctgctaaatccgagcctgcattttcagcacgtctccaggcagtgtgcacagagccatcgccatcatcgccatgtgcttacgcagacaggttcttttctgagctgaccagaccttgtggacattgggcggagtaagtcccttccctgctggatagagctggggctcagtgttccttgcattcgcccctgccaggcagtgaaaggaaagggcttagtgttttttaggaaagatcgtcgagtccactcctcccccaaccccattttcctttaatcctgggcaatgaactgtaaagtgggaggggctgaagagaggaaggactgacttgctattctctatcagcagccaagagaacagccccaagtgtagtcagccgggaacactccccgcctgcctctacagggagctaagacatcagcaagataggtattgtttatgtatacataggtatgcaggcatatacgtatacatacacatatatgcgtatacccactcacgtatatgcacatatacacagacatgaatatgcttatgtatatatgactgtacacatatacatatgcatatgttcgcacagacacatatatgcaaagatggatgactgctggtttatgatcggtctcatgtagcccaggctggcctcagacttgtcatgtggctaaagatgactgcacttctgaccctcctgagtgctgagattataggagtccaccaccacgtcaggttttagtgcttggggaccaaatcaggcctccgtgtgtgctggagaagcactccatcaagtgagcccagctccagcccagtcttgctgagttagaattcacccaccaatctgcccagttcttagttggatcttttacacactcacccatctactcttgttttgttgttcagtgggtctaaagttttgggtcattcacaccaagcagaagtgtcacaaggcacagtggccgagtggcagctggcgtgtaagatccaaggcccgtgtgtgccacctgctcttgcctgcctttcacgaagccacggacccctcgggcctctggctccccaacggtcttgtatacagaggagagcaggcagccaatccttggcaaattattcatgtccttccccatagctacacaagtcccttaacgtgaggtaacagaaaacctagatttttctaagaacgatcattttttatttcacttaaaaatatccgtgaaatatatattacataaatatatcattttaactgctttcagtgtgtagcattaaatatgtctgcgttgtgtagagaccttcacctacatttccaggaccttctttattgtccccaactgaaacactcactacccattaaacatatctctccatcccagctcttgatgaccccccaccccaaattcctgtctctaaacttggccacaccagaaatgccaaacaagccatcttgtcctcggtgactggctcattttgctggtttgtttgtttgtgtgtttttgttgctgttattgttgaagcatgtgtcaaatttcttttgtaaggctgaataatatttttggttttgttttttaatttttttgttttttgttttttgagacagggtttctctgtatagccctggctgtcctggaactcactctgtagaccaggctggcctcgaactcagaaatctgcctgcctttgcctcctgagtgctgggattaaaggcacgtgccaccatccccggcctgaataatattttgtccattactgaacaccagggtttccatcattggccactgtggctcacattgctgtgacctttgccatacaaataatacactgggtccctacattcatttcttttgggtgtgtacccagaattacagttggtggatctaggagagaaagaagtcttaaccagattgaaatgacgtgtgctgtttcattttgtagtgctgggaatggaagccacagctttgcacaggccaacttctgctttaccggtgagccacattctgtatactgggtgtgggggtgtctcatggtaaatagggctagcttgttagcttgtgactctgagttgagaactttggagatggccatgatatcaagggtcattcattttcaatgggtccacttagccacctttcgctactgctaaaactggggaagaaaattgaggccgtgcttcaactacagggatgggcagttgcgtgccatcctgtatggatggaattggtgaactttgtgccagaggattaaaaacgcaggcaaacaaacagaaacgcaagcccatgacctgtgattcaggggaccccatagtggttttagagcaaagtgtgaaagagaacaggaagggatcgttatgtgtgactcatggggttgtatctgtgagcctggggtggggacagatgtcctgagatggctcagggcatgttgtgtcttaaatgagatgccaaatactgtagatatcagataattctgctttatggacacgaatgttttcatctattagttaaaagaaaggtctttaccttcttgttaaccatttttcattcattcattcattcattcatttcagctgagaacttgtgtctttgaactcacagagatccactagcctctgcctcctaagggctagcataacaggtgtaccatgatgactgacgtaaaagcctttggatctaatggtctgggggaaatgtcgtgcgcactgaaccttcctttcccctttggagaccggtgcttagaaacgttgaacctagcataaaaccctctcttctttttctttgaggatcaaactcaggcagggcttcattcacactgtgctagtatttgaccatttcatcaccccacccccatccccacccccactcccacctcccagaccttaccccaccccacctctgcagcctcacccctccccacctctgcctctggtgttggtataacagtttcctcagacattaaagcattccctcctgcaagaaggtagactactcaaaatagctttaggaagtccctgaaacagaccaagttcactaggtccctccctctacgagtaaacattaaaagttgagctttccactcaggttggataaagttgagctgcagaggcaactcagaggccagacctgaaagaagcagaaactgtctgagatgaggtttagaccaacccaggcacctggaaaagttcctttccaacctgctggctgagctgtctgcaggctgtgcagcatgctccaggttctcagcctgtgagccgtcacccatgctggggcaggattgtagatgccattgtctgaatcatttctgcttccgtaagtaacccttcacccacattcctgaaagtaatctctcacccatattcctgtaagtaaccccaataaactcgtggcattcacactttggtctgccatgggctccctccctatttggggtgagtagctgtgtgtgttgcatccccccaaggaaagtcttgtcacacaacaccaggtattctttgcacctgaatggtgtggtgacctctgagggtggttagggaatgcaggagttggtacctatggtacctacacactgtgggccacctgccctggccagtttgctgtcttcccaggacagcaacagcagggagaggcctcagcaccatcaagcattggtgtaggctgtgtttttttgtgtccttgacagcttccctgtttaggctttgaggagaaagagttaactttgccatagtcccatgacattaggaaaatccctctggacccatgcttggatgcttggatgcttggatacaggcattccagagatcacttgtgggaaacctactgtttgttgttgtgtatttaaggaaacagcttggctatttgagaaaacaagcaggatgtttttgtgattgcaaagccaatgaaggtcccagacacacactgggaaaacagaacaaaatacgagatgtcatcctttgccatagatgtgtctgtaccgtatatgagagttgggagagttgcttgtatttaaaaaaaggttaagggggctggtgagatggctcagtgggtaagagcacccgactgttcttccgaaggtccagagttcaaatcccagcaaccacatggtggctcacaaccatccgtaatgagatctgactccctcttctggagtgtctgaagacagctacagtgtacttacatataataaataaataaataaatctttaaaaaaaaaaaaaaaaggttaagccgggcgtggtggcacacgcctttaatcccagcacttgggaggcagaggcaggtggatttctgagttcgaggccagcctggtctacagagtgagttccaggacagccagagctacacagagaaaccctgtctcgaaaaaaccaaaaaaaaaaccaaaaaaaaaaaaaaaaggttattaagctgtgcatagtggctgtgctggttagtgttgtcagcttgcctagggcacctgggaagagggaaccttaactgaggaattgcctccatcaggttggcctgtgggaagtctgtggggcgttttcttgaccagtgactgatgtgggagtgcccagatggctgttagcagtgctgcctttgggcaggtcctgggtgttataagaaaacaggctgagtatgccatagagagcaagctagcaagtactgtcctttcatggcctctgcttcagttcctgccccagattcctgcccagcttccctcaatgatgaactgagacctgggagtgtgagatgaatatgcctctcctccctacgttgctcttgttcatggtttctctcatgatggcagagagcaggaggattgactcaagtttgaggctagcctgagctacatagcaagtaagacctttaaaaaaccaaaagtgaatacatctataaatcaaccgaataagataaaaaggataggtgggaatgctttagatactgaatggtaggtacctggggaaacttgtagccgccatgatgcgcatgtggaggtcagaagacagccttgggcattggtcttcacctgtcaccttatttgggacaaggtctctcttttgttgtttgctactgtgtacctgggctagctggttagggagctcactgagagagcacagggctctgtgtcacgtaggtcttgggatttgaactctgttctaaagggtgtcatagtcagtgctttacacatgggagccccccccccccgccacgcccccacgccccctccctccccagctaacccagcgggattggacagaaagaaatgatgcacatataaaagggacaagaattgcatttgcagctgtggcatggtggtgcacgcctttaatcccagctcttgggaggcagaggcaggtggatttctgagttcgagtccagcctggtctacaaagtgagttccaggacagccaggactacacagagaaaccctgtctcgaaaattcaaaaaaataactttataaatatccctctgagtttggttatttttctacatgtcgaattctgtttggccaaggacagcagacagcatccctcagaagcaaatgtgaggactactcgtcacccccaggaaccccaaggatccccacttggtccctagggcagaaaagggttgaatctgccgattttctaaaaagaagcctcatggcagagtggggagtctgactttgctgtggtaaaaggatccgagtcagtgtgagtgtctagggccccctcggtctccatggcgcctgagacctgctgagaaagctttttctcagcctgaggggaggtgacttctgtttgcatggtaggtcctgtctgagtggaaagaagctggcaagtttgggtgatgtgtaggggaaaggggaaggctgggggtggaggagggcctagagggtgggggaggggcagggtcaaggctgagcctgtgtgaagaaggtaagccatcacagttggccctggaggcatcctgatgggagtgctcccaaatggggcaggcatgatgtgatgtgctcctcagatctccaggctgacatgtttggaacagtgaagtcttcaggtcaatgttggcaacaggtaagggtttggggcccatctggggagagatgtcttaggtagaaggaatccagcatggttgcaaaagaggtcatgaaagggaggagagctggggaaggagggggaaggagccggaaggagagttttcatggtgactgtgatggggtctgtgggaggccaagggtgtgtttgtacacagtacctatgagagcagaaatttgctctcatgccacctggtttcctgtacttcaacagagacattaaactttggagacactatgtagttattgatttttgtggaggacttttgttcaaatgctccaaggaagtctttattttatagtgtgtgtgtgtgtgtgtgtgtgtgtgtgtgtgtgtgtgtgtacacgtatgtatatacatgtgtacgcctgtgtgtagttcagcttggcaaaggaagttttctctttccaccatgtgggcatggagcccagtcatcaggattggcagtcagagctgaaacacctagccacctctatttgttattattttcttgtttgttcctgagagaggatctcaggtgtcctagtccggcctcaaacacactatgtagtagtcaagggtgaccttgaatttctggtcctcctgcctccacctctgaagttctggagttgcaggccgtccccaccacacccagtttatgtggtgctcagaatcaagtccaggacaccctgcatgctagccatggctccctgcgtgctagccagacaaacagccatgtggacaccctacaccagcacgtggcactggtattgctggtgaccctctgcaggctccctttaggacatcatccatacttgtctggtgccaagagcgagtgagcctgcataagggacatttccatccttttctgtgacatgggggtggagagcttgactgttggagctgtgaattgtgttaaatcggagccaatcagaagctgcttcagttagcaaagattcctcggcagctggcagccgggtgagacacttgacagtgctgagtgctgaaggtataagaatgtgtgtcgatcaccccacagaaagagcagctggggtgggcgtggtggcacaggcactctggagatggagtctggagtctgtcagattggactacacgacctgggctacacatgagaccccatctttaaagaagaacaacaaaacctaaacatcacctggtgcccagaggctggctgggcctacgcatctcctcagtgggtgctttggtacctattccatagcagcttcactcatgagaccccccctccccaaactgaaacccccaaatgccattcagtgggaacagggacaaaccacacaatggagtattactcagccaggagaaagaatgaggcatgaatgcattcaacaaacacctgaacgttgcagacagaatgttgagcaaaagaggccgatgcacaaggccattccggaggattgcagaataattttttttcacaccagagatgtggatgtgtcccgcaaagtagtacacaaagggacactgccagtgtgagccgtaattaaaacctgtgaaggagttctagttaatttgtctgctctcaggtgggaactcatcaggcagtaaaatgaaataaatgggacccggcagggtggctcaggaagtgaaggtgcttgtggccaagtctgaggacctgagttctatccctggcacccacaggtggaaggagagagccaactcctgaaattgtcctgtaacctccatatatgtgtcatggctgacacacgcacacacacaaagcacacacctacacacactttgtcaggtggtccttaaggtgactgacagttatccagtcttcagggtgggtgatggaacttgagtgttttgttgtttatttttttccccgtttcctaagggtgttttattcttctgactcgagcacttgcttgggggttcagaatttaaaggagagtgaaaaaaaaaaatctcaggaattacgatcagtctttttttcttttgagtcaggaattgaactcagtacctccagcccaccataagcatgcagttgaccactgagccagatcctcagctcagtataagtggttattttaatgtagttctttaaagactccaaatgatgatgggggcggggggggggatggaggggcatgagaggcaaaataagaaaagattaattcaagacaggatcagcactgttggttttcctcttggctcagtttccagtatagctcagtaggaactgaggatggagccaggaagagtctgtaaggcatgagaaagagcagctcgccctggatatgtgacctacaaagagcaaaaggacaaagatgaaaatagccatgttccaggttcaggcccgcggtgtcctgtgagggaagtcgcctgagttgggtctggcagcaggttctgttcagggtgctgaatattccacaaaaggagacaaagtatgatattccttaaagtaattaaacaaaggtttgtcagtttaaaggctcccacccaggacatcacaagtgttaggcacgcgctcctcagcccagcctctccccaagcctgcaatgattgtcttgctgatgttccatttgtttgcgtgtttgtcagcgttaacccgtgggctgccctggcgttataaatcaaaaatatgagcttgtcaagacttgtgtaactcatgtatgacttaaacgaagacggcagcaccaccaggtcttggtgtagagtgctgtttgatggttaatcattacccacctttcagctagctgtgtaattgctatgggtataattacctggtagacaggggtggaatttggtaatttgttaacctcaagactgcatgcgtgctattgtgtgttactgagtgtggttttgcaaagggccttttgtctttctctagtgagtgagagatgcccatctggcagtctggatctgttgccccagagtcagcacctcttccggttgccatagagacaacctcagcaccactaggcatcccctcctatggattcctgctagggttcccgatcctgtgcctaggtgcagtttctgaaaatgctggaaggtctttcaaagtgcagggtggtggggtcagtttccagagcagatactagtcagggtgaaacctcccaggcttataccctcattggtctgttcaccgctctgcccccttcccaggtctggagggcttacactctagcagtattcctggtctatgggaaatgagctctgggctggccagacccagtcacaggggctcctggaggggctgttcactatgccacaggactttctgccctttcctaatcagttaggaattgcctccttccctctgtcctttctttgttctttaagttgtgtgtacatactcttgagtgtgtgtgtgtctgtctgtggcagttaggggctgatgtctaggcagattaactttaactggcagaaaaaaacaagcctgtatcaatgcctttctcagtctctacctcattcatttattcattcattaattcactcactcatgtgcatgtgtgctcatcacgggggcccttgccttttatcatgtgggtcccaggaatcaaactcaggtcatcaggctgggcaaatgcctttactggctgagctatctcaaggggtttctgctttattttttgagacagggtctttcattagacctgggatatcctgttgtgctttataaaaggaaaagaaggcagggatatgtttggtggagtcgtggtataatgtgggggaagggggtgcctctgagggcccatgctgaggcattactttcttgctcctccccccagtccacctcccacccccactcctgccccaaggtaccatccacactaccgcatagtttatgtagggcatggggaggggagttgatggggtagtaaagacagagaaaaggtgggggggggagtagaggccgaccatgagcgcgtggagggggggggagggaatggggtgnnnnnnnnnnnnnnnnnnnnagagcaagagagtgaggaggggggcaagcaaagcagccccttttatagtgaatcaggcacaccaagctgttgccaggcaactgtggggcggagcctagacaaaatgccaacactgtcccctgtgggtgctgggactcagactcaggtcatcgtgtttgtgaagcactgtactcgttgagcactctccagtctcagcactttcatccttacttgtagacgtgcacacagctatttggatataccatgtggctgttactttgagaagttggctatttcaaggaattgatcctttcgccagcatatcgtaaccctctagatggcatcgagccctgaagcgatgggcccacctttctccccacacttgcctttcatgctaaggccgtgtctattcaggggaattgttgggtctgagcgtctcagctcaggaaagcggcaggagtggcttctggaaggaagaaagaaggccccgagggaaataaagactaagtgtgggggagggctggactttcccacctccctggaggaggggcggcagaggaaggaggcagacgtggtcacgtgggggtgagctcattagtcctgggacaccagctgcgctattcttagggcggtttccagtcgtggacagatgttcttaggcgcggttccagccaagctcacttcccgcaaatggtataatacagggtgtggaaaagtcggggttcactctggtagatagtttgcccaggcaacagtgccttttttttttaaccacagagttttcccttttccgtctttttatttttcctgtctttctctccgttacttttctctgttttctcttccctgtccttctccacctctccctctctctcgaccctattttccaagttctctttctgtctgtccttcttccccatccctcccacttccgtgtgaaacttggtcgctgcgggacacaaagcctgtccgtcctgatcaactgtgaacctcagccttgcttagatagtgtcaggtgtgctgggaggtctgggggtcaccctgggtgagagctgttaagttacaggagcctggtttgaattgcaggttggtatcttcctgtcctcagagtgtggcagcaggctgagaagtaagcctggggcagaggggacaagcttgtgtgacattagccagctggtcatattttctgctgctgtcctgggtccaatcacagcctccacaggacagactcgctgttacactgttctcactgtcggaggctttgaggcaacatatcccgggcgtggcctctccgtggacgctccctaacatttatttcaaagtgcaggagtcttgatcggtttaagtttgtaactgtagcagaacttcctgattatacacacaacataaggaagtggtctgtgtacaaatgaggggcgtttctgactaattgtggtcacagctgcccgaagacaattttaaaggagaatttcaaagacaagtcagtatatctgcttagaaaaatacttatggatttaaaattattgttgaattgttaaaataaaaatcaaagatttggggttaggaggaagccccagacctgactatgtggtgagatgaacaaatactgagcccagcaactgaattctgtggtccgttccttttcatttggggaccgagtctttgcctttcctaactttcctgtgtctggatcatagattataaggcttctgcttgaagttgctcctcctcttcttaacatccgtgagctggaccagagaaatggctcaacaattcagagcactggctgctcccccataggacctacaacacatacacgtcacacacacgcataccacccacactcacacatatgattatatgcatatcacatatacataccacacataaatacacattacacacacactcataccacatacattcacacacagatcccacacatacacatcatacacacacacacacacacacacacacacacacacactaatatacattccacacacattgcccacacatcacatatacatacgtgggtgcacacacatgtgtgttggagctaggggattcctggcagaatggagaggggtccaggctggtgtaaagtggtttaactgtgagttgctgagtgtcaaggacagagctactcagcatctagggagaagagagtagtgggcaggtgacacaggtgtctttgggaagggtaggagtaagcagagactgaataatggaagtggatcatgggaactgtgcagggagaggttcccagagccagcaaatagtaagtggcaggactaggcagggccattgtgactggctgaggcctggagtccctagggaggtgatatggaggcagagggacctggtggtggtcagggcaaatagacacccacatcccactttgacttgcctggtgagaacttagattatgatcagagtatgataggaagttgctcaggggagcaccatggccctgttgctatggagagccaggagagtgaggcagaacaggctccaggaggaggacttcagagggagggtcatactgcaggctgtggggactcagggcatctggctgtggacaccgagagcctaatgtgaggaccggatccatgtaccttcttaatggagtttgtgatgtcagagcgtgtttacctttagtggtgatggtggtttgacagtaggtgttctgtgtaattgctaatcaggcatttagcaaagaaggcttagtgacagatgcatctaagaagcatatggtgtctttatcccagggtagacttggaacacaaggacgttgagagccacattttattttgtagctaagcaattacttttctcactggatgtgatagttccagtaggggatcccagcccagcagtatcctggaggccaaggcaggaagattttgagggcagcctgggtcataaagagggttctagtctagcccaggtcacacggcagccagattattctggctttctctaattgtcagtttgaagagccacctgggagaaagccttgtagagggattaccactctcagattggcctgtggtggggccatgtggattatcaattgatgctagagggcccagcccactgtgggcagcaccgttccctggttggtagtcctggattgtgtaaggctagctgagcatgagccagagagcaggccagctaacagcgtccctccgtggcctctgcttgaattcctgccttatcttctctcagcaatggactgggtcctggaagtataagccaagtcagctcttttctctcccaagatgcttttggtcatggtattttatcacagcagtggaatgaaactagaacacaaacatacaaaaaatgttttcttgaaggaagaagaaaaaaacgttagacttcctccttccttgatgatcacgaggctactgctgaccaaatcactgaggagaagggcatactgctgccaagggcattagcatgacagctggtgtcagccaacctcactgactgtctcctgagtcgaaagctttccagagattctcagtggcttgctccgtaatggtttctcatgagtactgtgtctgtgcctagaatggatacagtgtctcatccgagcctcaccctgggggcggggaatgtgacctgtcttagtgtgcctgcttagcatgcagccctgagtttgatccccagccaccacacaaactgggtgtggcggtcggtacaagcctgtaaccctggcactcaggaagtggaggcaggaggatttttcagttgaaggtcattctttagtacactgagttcaaggccagcctgagatccctgggagcctgcctcaaaaacaaaacaaacaaacaaacaaacaaacagccaaaaaaatcactgtgttaaaaattattctgtgaattagagcctggttgcctggggtgtgccccctccttccttacagcaaggtgatagtagattccaggaagactgaggccagcttagccagctctcttgaagctgcttcacctcagcaagcagggtgggattcattcctactttgtaagacttcttgagaggccaaggagggcactggcagctccatctgcaggttcaggggtgggaggaggggttgggaggggtggggtgggggcatggttggctggtagcatagcatgaagctgtgggagagaaaggtgccccannnnnnnnnnnnnnnnnnnntggtgggggacgctccatggcgatgagctccttggggaaatgaattagggttgtacctgctcattccagaatgttctgtggtttcccagacaggcccaggggtggaggtagggagtcctgttctctctaggttgaaggactacccatgccctgtgatgtgtatgtggattgtcaattttatttttaaaatatacctgggtattaattaattaattaattaatttatttatttatttactttgtaggtcagtctggactcaaattcttagagatctggttgcctctgactcctaccttctgagattaaaaacgtgataccatgcttgccctccccactcctccttctgtctcccacccctgcttttaatccgcatatgcagatgagaacggccatcataaccgccatgcttgagctccacttcatcttcgggtgtcctgctttgtttttgttatcaccgtgtcacaaactagagtcacctggaaagagggagcctcgggtgaaggctagcctccactgggttggcctgtaggcacatttgtgagatatcgtcttggttggtgattgatgtgggcggaagggcacagcccactgtgggcggcaccatccttaggcctgggctgtatatgaaggcttagctgagcatgagcctcagagccagcgagcggagtccttccatggtttctgcttcagttcctgccctaactttccccagtgctggatatttaacctgaaatgacccctttcctttgttaagttgtgctgggtcagacagaaagcacatggaacagttgggaacattcggaattttctcaaccagttctttctaaacttgcagttagttgtcgtcattcaaagtcacctgccctgtaggaacgtgggggattttctctcctttcctctgtcctgttaaccatcctcaccgcatccttcttcaatccagggcttgctaaggtgttgctcaaataaatttaagaaaacactcaagaagtttaggtcctttgttttcctgataaccaaatagctcccaaattaccaaaaactacgcaccttgtgtgtttagtgtcgggtgtggactgctgtctccatttttatttcttcctggggtgctgctgatacaccttggcctagcacatcagaggtcctggatttcgtccctagcagtgtgaaatggggtgtgggagacacaggatcctcagggctggcctcagtaagctggaggccttccctggctgcatcagacccccatctcagaacagtagaagaaaagctacctgtctcctcttactcagtcctggagtttttattatttatttatttgttaaattttattttatttatgagttccagttatttaataattttattatttatttatttgttatatgtaagtacactgtagctgtcttcagacactccagaagagggcatcagatttcgtggtggttgtgagccaccatgtggttgctgggatttgaactcaggacctttggaagagcagtcggcgctcttaaccgctgagccatctcaccagccccagtcctgggttttgttgttcccaagattgttccagcaacattctaactcagtctaaatgtgacagccagcctccacctttcttacatccgagagccagatggcagtgagcggctgagtgtggggcctgctagagatgcaggttttccttagaagctgacagccatgcttgttctggaagtattagcttacccagctctgggtactatgaacagcgaggtaattactgcagcctcattggtccatctcagccagttagaggaaggctttccaaggggcaaagggactcattacccagccaccagggccctgaccctcctccttagaagtggtgtgagctgcaattaggggctttggaatggggataactgactgctgggccataaataatgcaatctaccctgtctcgcagtgactgaagctgccacggtcacacggcttttagtttggaaacctggccctctgtcctccgtgcagctggtgtaggctgtgtgatctcatggagttcttagccagtgagcctcagcagcattccaatctacagactaaggcagtacaggtaatgtgcttgcagcggttagacagggagaagcaggagtctgcctcctgtgtgctcattggcaggaatgaggatcagggttaggatcagccaccttggattatttggatttcccactgtgcaccgtttgcatcctgcaccctggggatggagcccagggccttagaggaatcaataaaaaattgccaattaactttattgttagcgaatgggtgtgggtgggacacgtgcatgccacagacaggatggccagaggtgaaagccagaggacaaggtttgggagtttgtatgggtgttttgttttgttttttgtttttgtttttccgagacagggtttctctgtcctggaactcactctgtagaccaggctggcctcgaactcagaaatccacctgcctctgcctcccaagtgctgggattaaaggtgtgtgccaccactgccaccactgcccggtggtttgggagtttgtgtccctctactgtgagctctggggattgaactcagctcatgaggcttcaccagcttagccatgtcgctggcccctttcccccaacttcttcccaccctgagccagccttgttctgtaagatgtcttggactcaccccactgctggctttccagacctcatagcttctccaagcctcagctgtttccctccttcacttcctgtctctccagagaggccctctgcctcctctctctaacccagtcagcagcagacagaggagccattactccaccaggacacgccttccaggctgacattcttgacctctgactgcatggtcagagttatacaaattctgtgtctgtgtacatgtgtgtaagtacatgtacacatgtaggtgtgtgggtgtgcacacagagatcagaggaagccctgggctgtcatttatgtcctgtctacctggtgttttgggacagggtctctctcaggccagctaggctggctaggcctccctccaccctgagcacagggctctaaggtcgcagcaccttgcctgccttaagagttcttttcttcatttttttttaaagattattttattttattttattttataggagtacactgtaactatcttcagtcacaccagaagagggcatcaggtcccattacaggtggttgtgagccaccatatggttgctgggatttgaactcaggaccttcagaagagcagtcagtgctcttacccgctgagccggctctttccttcttgagatgtacttttcccctgggctccctcctgtccttttttccacccttgccttgactgttcctgtgggctgaagcctcctctctccaggcagccttcaactgctgctcctgctgtggctcctgctggttatccagccagttatccagcacattgcccctgagctgtccccaggccagtgtctttgttgttagtatctagtttctgactcactcctgatccttgagttttactgtagtttatcctcctgttatcagcctcctgtggctgtaacaaagtgtctgaaataatcaacttatatcaaagtgtctgaaacaatcaatttatcaagaaggaagatttggctaggccgtagcacatgcctttaattccagcacttgggagggaatgacagattaatctctgtgagttcaaggccaacctggtttacaatcaggctacacagagaagccctatttcaaaaaaaaaaagagggtggggtggggaagatttcttctggttcataataaggggccttcggtttatggtcatttagccagtgcagtgcagtgcagtgcagtgccggacggtgggaacttgtgtagagaagaggcctggtcccacttgatttcatactcctcatgacccaagtcttcctattacaccccaccatctcccaggtgtcccggataggatatggacaccttgcagtacaaacagagccccatcattcctgtgcttcaaacaagctcagggactccccagtgggctcaaaaggctgccatctcctcttgctgaagctgtgcaggctttttcagcttccccctggatgcatccagtcccacagactttcctttctgttactcctgcccgtggctcctgcctgtggctcctgcccgcggctcctgcccgtggctcctgcctgtggctcctgcccatggctcctgcctgtggctcctgcccgtggctcctgcccgtggctcctgctcttttcctcagcacaccctaatctggcaactcctgctcacctttgaggcctggcctacagttggccagggaagccctctctgaccctaggtggcctgtctgtatcagcatttcgacagtggctcagctgctatttttgtctgtggccacttgaaggtaaagaatattgtaagagatgtcactggtcaacaggggacacgacccagcgtcttggacggcgctggaagagccactgctgcctgttattagacgcgttctcacgaccggccaggaagaacaccacagaccagaatcttctgcggcaaagctttattcttacatcttcaggagcaagagtgtaagaagcaagagagcaagaagcaagagagcaagaagcaagagagagagaaaagcaagagagagaggcaagagagagagaaaacgaaaccccgtccctcttaaggagcattctccttcgcctcggacgtgtcactccttgattggctgcagcccatcggccgagttgacgtcacggggaaggcagagcacaagtagtcataagatacccttggcacatgcgcagattatttgtttaccacttagaacacagctgtcagcgccatcttgtaacggcgaatgtgggcgcggctcccaacatctccccctatccttttaataagagcaaataggccacccatattaatgagagtggagatagaggtcaaatccccagtgtgtaggtaaaggagccatgtacaggattagctcttaggcttacaggcttttacccagagcaaccctgacctgctcccgtgtcgtttnnnnnnnnnnnnnnnnnnnnnnnnnnnnnnnnnnnnnnnnnnnnnnnnnnnnnnnnnnnnnnnnnnnnnnnnnnnnnnnnnnnnnnnnnnnnnnnnnnnnnnnnnnnnnnnnnnnnnnnnnnnnnnnnnnnnnnnnnnnnnnnnnnnnnnnnnnnnnnnnnnnnnnnnnnnnnnnnnnnnnnnnnnnnnnnnnnnnnnnnnnnnnnnnnnnnnnnnnnnnnnnnnnnnnnnnnnnnnnnnnnnnnnnnnnnnnnnnnnnnnnnnnnnnnnnnnnnnnnnnnnnnnnnnnnnnnnnnnnnnnnnnnnnnnnnnnnnnnnnnnnnnnnnnnnnnnnnnnnnnnnnnnnnnnnnnnnnnnnnnnnnnnnnnnnnnnnnnnnnnnnnnnnnnnnnnnnnnnnnnnnnnnnnnnnnnnnnnnnnnnnnnnnnnnnnnnnnnnnnnnnnnnnnnnnnnnnnnnnnnnnnnnnnnnnnnnnnnnnnnnnnnnnnnnnnnnnnnnnnnnnnnnnnnnnnnnnnnnnnnnnnnnnnnnnnnnnnnnnnnnnnnnnnnnnnnnnnnnnnnnnnnnnnnnnnnnnnnnnnnnnnnnnnnnnnnnnnnnnnnnnnnnnnnnnnnnnnnnnnnnnnnnnnnnnnnnnnnnnnnnnnnnnnnnnnnnnnnnnnnnnnnnnnnnnnnnnnnnnnnnnnnnnnnnnnnnnnnnnnnnnnnnnnnnnnnnnnnnnnnnnnnnnnnnnnnnnnnnnnnnnnnnnnnnnnnnnnnnnnnnnnnnnnnnnnnnnnnnnnnnnnnnnnnnnnnnnnnnnnnnnnnnnnnnnnnnnnnnnnnnnnnnnnnnnnnnnnnnnnnnnnnnnnnnnnnnnnnnnnnnnnnnnnnnnnnnnnnnnnnnnnnnnnnnnnnnnnnnnnnnnnnnnnnnnnnnnnnnnnnnnnnnnnnntagcatagcatgaagctgtgggagagaaaggtgccccatgcttttcctgtggacactggtgggggacgctcgatggagatgagctccttggggaatgaattagggttgtacctgctcattccagaatgttctgtggtttcccagacaggcccaggggtggaggtagggagtcctgttctctctaggttgaaggactacccatgccctgtgatgtgtatgtggattgtcaattttatttttaaaatatacctgggtatttatttatttatttatttactttgtaggtcagtctggactcaaactcacaaagatctgcctgcctctgactcctaccttctgagattaaaaacgtgataccatgcttgccctccccactcctccttctgtctcccacccctgcttttaatccacatgtgcagatgagaatggccatcataactgccatgcttgggctccacttcatctgtgggtgtcctgctttgtttttgttatcaccgtgtcacaaactagagtcacctggaaagagggagtctcgggtgaaggctagcctccactgggttggcctgtaggcacatttgtgagatattgtcttggttggtgattgatgttggcggaagggcacagcccactgtgggcggcaccatccttaggcctgggctgtatatgaaggcttagctgagcatgagcctcagagccagagagcggagtccttccatggtttctgcttcagttcctgccctaactttccccagtgctggatatttaacctgaaatgacccctttcctttgttaagttgtgctgggtcagacagaaagcacatggaacagttgggaacattcggaattttctcaaccagttctttctaaacttgcagttagttgtcgtcattcaaagtcacctgccctgtaggaacgtgggggattttctctcctttcctctgtcctgttaaccatcctcatccttcttcaatccagggcttgctaaggtgttgctcaaataaatttaagaaaacactcaagaagtttaggtcctttgttttcctgataaccaaataactcccaaattaccaagaactacgcaccttgtgtgtttagtgtcgggtgtggactgctgtctccgtttttatttcttcctggggtgctgctgatacaccttggcctagcacatcagaggtcctggatttcatccctagcagtgtgaaatggggtgtgggagacacaggatcctcagggctggcctcagtgagctggaggccttccctggctgcatcagacccccatctcagaacagtagaagaaaagctacctgtctcctcttactcagtcctgaggtttttattattatttatttatttgttatatgtaagtacactgtagctgtcttcagacactccagaagaaggcatcagatttcgtggtggttgtgagccaccatgtggttgctgggatttgaactcaggacctttggaagagcagtcggcgctcttaaccgctgagccatctcaccagccccagtcctgggttttgttgttcccaagattgttcctgcaacattctaactcagtctaaatgtgacagccagcctccaccnnnnnnnnnnnnnnnnnnnnnnnnnnnnnnnnnnnnnnnnnnnnnnnnnnnnnnnnnnnnnnnnnnnnnnnnnnnnnnnnnnnnnnnnnnnnnnnnnnnnnnnnnnnnnnnnnnnnnnnnnnnnnnnnnnnnnnnntggtgtgagctgcaattaggggctttggaatggggataactgactgctgggccataaataatgcaatctaccctgcctcgcagtgactgaagctgccgcggtcacacggcttttattttggaaacctggccctctgtcctccgtgcagccggtgtaggctgtgtgatctcatggagttcttatccagtgagcctccgcagcattccaatctacagactaaggcagtacaggtaatgtgcttgcagcggttagacagggagaagcaggagtctgcctcctgtgtgctcattggcaggaacgaggatcagggttaggatcagccaccttggatcatttggatttcccactgtgcaccgtttgcatcctgcaccctggggatggagcccagggctttagaggaatcaataaaaaattgccaattaactttattgttagcgaatgggtgtgggtgggacacgtgcatgcgacagacaggatggccagaggtgaaagccagaggacaaggtttgggagtttgtatgggtgttttgttttttgtttttgttttttgagacagggtttctctgtcctggaactcacgctgtagaccaggctggtctcgaactcagaaatccacctgcctctgcctcccaagtgctgggattaaaagcatgcgccaccactgccaccactgcccggtggtttgggagtttgtttgtgtccctctactgtgagctctggggattgaactcagctcatgaggcttcaccagcttagccatgtcgctggcccctttccccccacttcttcccaccctgagccagcctagttctgtaagatgtcttggactcaccccactgctggctttccagacctcatagcttctctgagcctcagctgtttccctccttcacttcctgttccagacctcatggcttctccaagcctcagctgtttccctccttcacttcctgtctctccagagaggccctctgcctcctctctccaacccagtcagcagcagacagaggagccattactccaccaggacacgccttccaggctgacattcttgacctctgactgcatggtcagagttatacaaattctgtgtctgtgtacatgtgtgtacttgtgtgtgtatgggtgtaggtgtgtaggtgtgtacacacgtgtgcacatggagatcagaggaagccctgggctgtcatttatgtcctgtctacctggtgttttgggacagggtctctctcaggctagctaggctggctaggtctccctccacctagaaaaagcagggcgctcttttcttcattttttttttaaaagatttatttattttatgtataggagtacactgtcaccgtcttcagacacaccagaagagggcatcagatcccattacaggtgggttgtgagccaccatatggttgctgggatttgaactcaggaccttcagaagagcagtcaggctcttacccgctgagccatctctccagccccnnnnnnnnnnnnnnnnnnnnnnnnnnnnnnnnnnnnnnnnnnnnnnnnnnnnnnnnnnnnnnnnnnnnnnnnnnnnnnnnnnnnnnnnnnnnnnnnnnnnnnnnnnnnnnnnnnnnnnnnnnnnnnnnnnnnnnnnnnnnnnnnnnnnnnnnnnnnnnnnnnnnnnnnnnnnnnnnnnnnnnnnnnnnnnnnnnnnnnnnnnnnnnnnnnnnnnnnnnnnnnnnnnnnnnnnnnnnnnnnnnnnnnnnnnnnnnnnnnnnnnnnnnnnnnnnnnnnnnnnnnnnnnnnnnnaaataatcaacttatatcaaagtgtttgaaacaatcaatttatcaagaaggaagatttggctaggccgtagcacatgcctttaattccaacacttgggagggaatgacagattaatctctgtgagttcaaggccaacctggtttacaattaggacagccaaggctacacagagaagccctatttcaaaaaaaaaaaaaaaaaaaaaaaaaaaaaaaaaagagggtggggtggggaagatttcttctggttcataataagaggccttcagtttatggtcatttagccattgcagtgcagtgcagtgccggacggtgggaacttgtgtagagaagaggcctggtcccacttgatttcatactcctcatgacccaagtcttcctattacaccccaccatctcccaggtttcctggataggatatggacaccctgcagtacaaacagagccccatcattcctgtgcttcaaacaagctcagggactccccagtgggctcaaaaggctgccatctcctcttgctgaagctgtgcaggccttttcagcttccccctggatgcatccagtcccacagactttcctttctgttactcctgcccgtggctcctgcccgtggctcctgcccgtggctcctgcccgtggctcctgctcttttcctcagcacaccctaatctggcaactcctgctcacctttgaggcctggcctacagttggccagggaagccctctctgaccctaggtggcctgtctgtatcagcatttcgacagtggctcagctgctatttttgtctgtggccacttgaaggtaaagaatattgtaagagatgtcactggtcaacaggggacacgacccagcgtcttggacggcgctggaagagccactgctgcccttgtcctatgggactgaagcgtatacgtttcatgcaggccagctgtgactggctcacgtgctgtgggttctcagcagtagccgtggttcacggtggagcctgtacagggtgtgcgggtgggggtactcagtcaacactctcccatggcctttgattttcacaacgctcaaagcgcaacaccgtcgttggtatgagttattcttattctgctgtggtgagtgggcacactctgtggagtgggggcatcccgccagaacaagcaatctcagcatcttccccgagtgcgcgcgcgcctgtgtgtgcccatggcctgtgtgtgcacatgtgtgcagactgagggcctcaacattgggtgtcttctcaagttcttctccacctaagtatttaaaggatttttcttttgcttttatttttttgtgtatatgtggggaggagggggtctcacagcaccactggagatctgaaaacttcttatggaaggtctcttcttccaccactggggtctgagcattggattcaggttgtcgggtttggtgtcaggcgcctttatctgtggaggcaccccaccatgagcaccattacaccacccctgatgcaggatctctcacagagccccctgactcagcgcaatggctcaggtgattctcctgtctccacctcttcagtgtggcattacaggtgtgcacttagattttttatgtgggttctggggagttttatgtgggtgtttgtgtggcagacatgttactactgactgagctttagagacggcttctgagagctagaggcctgccagggctgcctgtgtacacagcgctgctgtgtcctttagccttgtagggagttcattcctctttgagtgtagcccagccattgccggagatatctctgtggaattccagacacattctgttcgtacattgtgatacagagttagctgctctgggagtgtcgggacttgagtaatgctggcccaggcgtatggctggctgcttcatacccattctctctgacgactacacggatcctccctctttcttccataagctcctggaggtcagggtcctgccctccccagctctcactgcagtgtctggtgccccagatgttgaaggagcgtgggggcagggtggggtgagtctgggagtgatgagcagacacagctcccaaaggggcacacaccagactgtcggccttgcaggcctgcacaacacccccagctccacacactgctgatggtcctagctccttaggttgaaaagttttttctttccatggtgattgtcttgctggaaagctaaaaatgagagattatttgcagcagtcggtgtagtcccattgatgtacacaaggcagatgtagcacgctgcacgggtgctgcacgggtgctgcggctatggagtaggcacagagttgcgcaggatgagtcctctttgtccatcaaggttggtgagcctgttctaatcctcacatttccatatgaatgtgcgtgtgcgtgcgtgtgtgtgtgtgtgtgtgtgtgtgtgtgtgtgtgtgtatgtgttcatgctcaagaaggtaggtgtgcatgcacttgtgtttccagtccccttcaggtgcttttctgttcgggtgccacccagaatctctctctggcttagagtcccctatgctagttgttcagagagcccaggggcctcctatctccacccccagctccaccattgagattagtttccagcacatcagcttccttaaaaatgtgggttctgggggttgaatgaactcaggtcttgtgtttacatggcagaattttgctgaccaagccatctctctacaccacatttccactgtgagctactgtaggagtcgcatgcagtctgcagaacccgcttacaaggccctgacaggactgtcatcttcccatttctccctcagcttgtgtgggagaaattcctggttattcggacactgaagcgttgcatttttaaaaagcatatgagtatactgtacctgtcttcagacatatcccatgatagatggttgtgagccaccatgtgggtgctgggaattgaactcaggacctccggaagagcaagcagtgctcctaaccactgagccatctctccagtccctgagcattgcatttttgctgtgtttgtatctaaggagtttcttcttttgaggaatattatggaggagacagtttcctaagttttgaaatgcttattgctgctattagcagcacaaccggctgttcttcgggtctgacaaccctgccttttctctgaaaacatttgtgggttgcctaaggctttctctcttcctttttttttttcttttctttaaatgtccctttctgccctgtgtgagaagagaacagagagtcttacctttgtgaatactctgtcctaaggcacatccccggcccttcaatttatttatttttatttttaaaggtttgctatttttatgtgtattagtgtttcgtctgcatgtatgtctgtgcactacgtgcatacagggcccattgcacccaaaagagggaggtcagccacctggaactggagttacagatagctttcagttaccatgtggattctgggaatcgaacccaggtcctctggaagagctaatagaccagtgcttttttcttttttctttttctttttctttttctttttttttttttccgagacagggtttctctgtatagccctggctgacctggaactcactctgtagaccaggctggtttcgaactcagaaatccacccacctctgcctctcaagtgttgagattaaaggcatgtgctacaactgcccggcttctttacttaatttttgagacccgggctcactgtgtatctctggatggcctggaattcacagagatccacctgcctctgactcctgaacattgggattaaaatgtgtgtgcctccatgcctagcatagccgtggacttttgagacagggtttctaagtagcccctgctcatcttgactgacctgacttgcaacctccccgtccctgcttcctgaacactgccatgaccagcatgcactgcaccatggcttttctgtgtggatctagtccttatctttacagtctgagcgtctttttttccttttacgtcactactagattatggcaggaaccatggttggatgctgagtggcttgggcgagtgcagacagccttgtcttgttcctgatcttaggagcagatgttctgtcagctgtgatgttgcagaagtcccgttaagggtgggaaaatgtggctttctgattctggtgttgaattttgtcaactgctttatcactgagatggtcatacacttgtgttgttttaattttattaatgatgcttttgagttgtttctcgattgcttgtttttgaaatattgtttctgaacctggccttccaaaatatgttccttccaaaggaagacagttagacagacagacagacagacacacacacacacacacacacacacacacacacacacacggccttgttagtgttggggatcaagccagggtacagctctaactgtagttggctcagtgggctgtctgtccccctgtctgggcttggcttcatgttaccatactctgcagcggtcagacttttaaatccaataggaaaccccctctgtgtcattcaagctggaccttgggctttgagagctctctctctctcacttcccttggggaaggattaaaacttcagcctgctcctggagaaagtgcggttgttgtggacagcagaccgcagcttagcaactctggcaggcatgcagctgtctgcccagcttgtcgctctcccctcccccattcctcccttcccctgccccgtctctctcacccccacttcttttcctctggtccctccctcttgtttctccacacaccgcctcctgtttctccttttctcctctagtcccctctctttccccctgtcttgggagccctttgtccttgctatgacccctgttctgcacacacacacacacacacacacacacacacacacacccctctcactcagttcccttaacagacctcacagctcctaatggatgcgatttggctcctgtctgtgcctttctcttgaccagactccaggttttggtttttgtctttttggtggaaagtacaggaactcctattttcatgatacaggcagtttgtctatagnnnnnnnnnnnnnnnnnnnntaacttttcctcgggttcaagacccttggaaaggcctgtatacttattttgtgtaccatattttctctttgttcctactctctctccccgctttacttctgatagcttgtcctgaatttcatctagaatccgccctatcttaaccacttgataacatgtgaaaaggaacaaaagggctcctaacaccagaaaaaattcaaggccaaacatattccactttacttctgatagactgtcttgaatttcgttagaaagttcaaggccaggcttacctcgtaaagctgtactcactggtactctcgttccccagctgaaaagttctgaattcatacagttgaatccttcttaacagtctgctttacgggaacctttattaccgcgacccgcagttctggttctggaatgagggatcttccttgcgccagtcccgagtttttttctcgtcccggaattcggcaccaattgttattagacgcgttctcacgaccggccaggaagaacaccacagaccagaatcttctgcggcaaagctttattcttacatcttcaggagcaagagtgtaagaagcaagagagcaagaagcaagagagcaagaagcaagagagagagaaaagcaagagagagaggcaagagagagagaaaacgaaaccccgtccctcttaaggagcattctccttcgcctcggacgtgtcactccttgattggctgcagcccatcggccgagttgacgtcacggggaaggcagagcacaagtagtcataagatacccttggcacatgcgcagattatttgtttaccacttagaacacagctgtcagcgccatcttgtaacggcgaatgtgggcgcggctcccaacagctgcccttgtcctatgggactgaagcgtatacgtttcatgcaggccagctgtgactggctcacgtgctgtgggttctcagcagtagccgtggttcacggtggagcctgtacagggtgtgcgggtgggggtactcagtcaacactttcccatggcctttgattttcacaacgctcaaagcgcaacaccgtcgttggtatgagttattcttattctgctgtggtgagtgggcacactctgtggagtgggggcatcccgccagaacaagcgatctcagcatcttccccgagtgcgcgcgcgcctgtgtgtgcacatggcctgtgtgtgcacatgtgtgcagactgagggcctcaacattgggtgtcttctcaagttcttctccacctaagtatttaaaggatttttcttttgcttttatttttttgtgtatatgnnnnnnnnnnnnnnnnnnnnnnnnnnnnnnnnnnnnnnnnnnnnnnnnnnnnnnnnnnnnnnnnnnnnnnnnnnnnnnnnnnnnnnnnnnnnnnnnnnnnnnnnnnnnnnnnnnnnnnnnnnnnnnnnnnnnnnnnnnnnnnnnnnnnnnnnnnnnnnnnnnnnnnnnnnnnnnnnnnnnnnnnnnnnnnnnnnnnnnnnnnnnnnnnnnnnnnnnnnnnnnnnnnnnnnnnnnnnnnnnnnnnnnnnnnnnnnnnnnnnnnnnnnnnnnnnnnnnnnnnnnnnnnnnnnnnnnnnnnnnnnnnnnnnnnnnnnnnnnnnnnnnnnnnnnnnnnnnnnnnnnnnnnnnnnnnnnnnnnnnnnnnnnnnnnnnnnnnnnnnnnnnnnnnnnnnnnnnnnnnnnnnnnnnnnnnnnnnnnnnnnnnnnnnnnnnnnnnnnnnnnnnnnnnnnnnnnnnnnnnnnnnnnnnnnnnnnnnnnnnnnnnnnnnnnnnnnnnnnnnnnnnnnnnnnnnnnnnnnnnnnnnnnnnnnnnnnnnnnnnnnnnnnnnnnnnnnnnnnnnnnnnnnnnnnnnnnnnnnnnnnnnnnnnnnnnnnnnnnnnnnnnnnnnnnnnnnnnnnnnnnnnnnnnnnnnnnnnnnnnnnnnnnnnnnnnnnnnnnnnnnnnnnnnnnnnnnnnnnnnnnnnnnnnnnnnnnnnnnnnnnnnnnnnnnnnnnnnnnnnnnnnnnnnnnnnnnnnnnnnnnnnnnnnnnnnnnnnnnnnnnnnnnnnnnnnnnnnnnnnnnnnnnnnnnnnnnnnnnnnnnnnnnnnnnnnnnnnnnnnnnnnnnnnnnnnnnnnnnnnnnnnnnnnnnnnnnnnnnnnnnnnnnnnnnnnnnnnnnnnnnnnnnnnnnnnnnnnnnnnnnnnnnnnnnnnnnnnnnnnnnnnnnnnnnnnnnnnnnnnnnnnnnnnnnnnnnnnnnnnnnnnnnnnnnnnnnnnnnnnnnnnnnnnnnnnnnnnnnnnnnnnnnnnnnnnnnnnnnnnnnnnnnnnnnnnnnnnnnnnnnnnnnnnnnnnnnnnnnnnnnnnnnnnnnnnnnnnnnnnnnnnnnnnnnnnnnnnnnnnnnnnnnnnnnnnnnnnnnnnnnnnnnnnnnnnnnnnnnnnnnnnnnnnnnnnnnnnnnnnnnnnnnnnnnnnnnnnnnnnnnnnnnnnnnnnnnnnnnnnnnnnnnnnnnnnnnnnnnnnnnnnnnnnnnnnnnnnnnnnnnnnnnnnnnnnnnnnnnnnnnnnnnnnnnnnnnnnnnnnnnnnnnnnnnnnnnnnnnnnnnnnnnnnnnnnnnnnnnnnnnnnnnnnnnnnnnnnnnnnnnnnnnnnnnnnnnnnnnnnnnnnnnnnnnnnnnnnnnnnnnnnnnnnnnnnnnnnnnnnnnnnnnnnnnnnnnnnnnnnnnnnnnnnnnnnnnnnnnnnnnnnnnnnnnnnnnnnnnnnnnnnnnnnnnnnnnnnnnnnnnnnnnnnnnnnnnnnnnnnnnnnnnnnnnnnnnnnnnnnnnnnnnnnnnnnnnnnnnnnnnnnnnnnnnnnnnnnnnnnnnnnnnnnnnnnnnnnnnnnnnnnnnnnnnnnnnnnnnnnnnnnnnnnnnnnnnnnnnnnnnnnnnnnnnnnnnnnnnnnnnnnnnnnnnnnnnnnnnnnnnnnnnnnnnnnnnnnnnnnnnnnnnnnnnnnnnnnnnnnnnnnnnnnnnnnnnnnnnnnnnnnnnnnnnnnnnnnnnnnnnnnnnnnnnnnnnnnnnnnnnnnnnnnnnnnnnnnnnnnnnnnnnnnnnnnnnnnnnnnnnnnnnnnnnnnnnnnnnnnnnnnnnnnnnnnnnnnnnnnnnnnnnnnnnnnnnnnnnnnnnnnnnnnnnnnnnnnnnnnnnnnnnnnnnnnnnnnnnnnnnnnnnnnnnnnnnnnnnnnnnnnnnnnnnnnnnnnnnnnnnnnnnnnnnnnnnnnnnnnnnnnnnnnnnnnnnnnnnnnnnnnnnnnnnnnnnnnnnnnnnnnnnnnnnnnnnnnnnnnnnnnnnnnnnnnnnnnnnnnnnnnnnnnnnnnnnnnnnnnnnnnnnnnnnnnnnnnnnnnnnnnnnnnnnnnnnnnnnnnnnnnnnnnnnnnnnnnnnnnnnnnnnnnnnnnnnnnnnnnnnnnnnnnnnnnnnnnnnnnnnnnnnnnnnnnnnnnnnnnnnnnnnnnnnnnnnnnnnnnnnnnnnnnnnnnnnnnnnnnnnnnnnnnnnnnnnnnnnnnnnnnnnnnnnnnnnnnnnnnnnnnnnnnnnnnnnnnnnnnnnnnnnnnnnnnnnnnnnnnnnnnnnnnnnnnnnnnnnnnnnnnnnnnnnnnnnnnnnnnnnnnnnnnnnnnnnnnnnnnnnnnnnnnnnnnnnnnnnnnnnnnnnnnnnnnnnnnnnnnnnnnnnnnnnnnnnnnnnnnnnnnnnnnnnnnnnnnnnnnnnnnnnnnnnnnnnnnnnnnnnnnnnnnnnnnnnnnnnnnnnnnnnnnnnnnnnnnnnnnnnnnnnnnnnnnnnnnnnnnnnnnnnnnnnnnnnnnnnnnnnnnnnnnnnnnnnnnnnnnnnnnnnnnnnnnnnnnnnnnnnnnnnnnnnnnnnnnnnnnnnnnnnnnnnnnnnnnnnnnnnnnnnnnnnnnnnnnnnnnnnnnnnnnnnnnnnnnnnnnnnnnnnnnnnnnnnnnnnnnnnnnnnnnnnnnnnnnnnnnnnnnnnnnnnnnnnnnnnnnnnnnnnnnnnnnnnnnnnnnnnnnnnnnnnnnnnnnnnnnnnnnnnnnnnnnnnnnnnnnnnnnnnnnnnnnnnnnnnnnnnnnnnnnnnnnnnnnnnnnnnnnnnnnnnnnnnnnnnnnnnnnnnnnnnnnnnnnnnnnnnnnnnnnnnnnnnnnnnnnnnnnnnnnnnnnnnnnnnnnnnnnnnnnnnnnnnnnnnnnnnnnnnnnnnnnnnnnnnnnnnnnnnnnnnnnnnnnnnnnnnnnnnnnnnnnnnnnnnnnnnnnnnnnnnnnnnnnnnnnnnnnnnnnnnnnnnnnnnnnnnnnnnnnnnnnnnnnnnnnnnnnnnnnnnnnnnnnnnnnnnnnnnnnnnnnnnnnnnnnnnnnnnnnnnnnnnnnnnnnnnnnnnnnnnnnnnnnnnnnnnnnnnnnnnnnnnnnnnnnnnnnnnnnnnnnnnnnnnnnnnnnnnnnnnnnnnnnnnnnnnnnnnnnnnnnnnnnnnnnnnnnnnnnnnnnnnnnnnnnnnnnnnnnnnnnnnnnnnnnnnnnnnnnnnnnnnnnnnnnnnnnnnnnnnnnnnnnnnnnnnnnnnnnnnnnnnnnnnnnnnnnnnnnnnnnnnnnnnnnnnnnnnnnnnnnnnnnnnnnnnnnnnnnnnnnnnnnnnnnnnnnnnnnnnnnnnnnnnnnnnnnnnnnnnnnnnnnnnnnnnnnnnnnnnnnnnnnnnnnnnnnnnnnnnnnnnnnnnnnnnnnnnnnnnnnnnnnnnnnnnnnnnnnnnnnnnnnnnnnnnnnnnnnnnnnnnnnnnnnnnnnnnnnnnnnnnnnnnnnnnnnnnnnnnnnnnnnnnnnnnnnnnnnnnnnnnnnnnnnnnnnnnnnnnnnnnnnnnnnnnnnnnnnnnnnnnnnnnnnnnnnnnnnnnnnnnnnnnnnnnnnnnnnnnnnnnnnnnnnnnnnnnnnnnnnnnnnnnnnnnnnnnnnnnnnnnnnnnnnnnnnnnnnnnnnnnnnnnnnnnnnnnnnnnnnnnnnnnnnnnnnnnnnnnnnnnnnnnnnnnnnnnnnnnnnnnnnnnnnnnnnnnnnnnnnnnnnnnnnnnnnnnnnnnnnnnnnnnnnnnnnnnnnnnnnnnnnnnnnnnnnnnnnnnnnnnnnnnnnnnnnnnnnnnnnnnnnnnnnnnnnnnnnnnnnnnnnnnnnnnnnnnnnnnnnnnnnnnnnnnnnnnnnnnnnnnnnnnnnnnnnnnnnnnnnnnnnnnnnnnnnnnnnnnnnnnnnnnnnnnnnnnnnnnnnnnnnnnnnnnnnnnnnnnnnnnnnnnnnnnnnnnnnnnnnnnnnnnnnnnnnnnnnnnnnnnnnnnnnnnnnnnnnnnnnnnnnnnnnnnnnnnnnnnnnnnnnnnnnnnnnnnnnnnnnnnnnnnnnnnnnnnnnnnnnnnnnnnnnnnnnnnnnnnnnnnnnnnnnnnnnnnnnnnnnnnnnnnnnnnnnnnnnncgtgtgccaccactgccccgctggttgttgtcttgagacatgtagcccaggtttgtcatgaatttagccttgtgagattaggtgtgtgtcagcagacctagctagaactagttttgaatggatcacagataaaatcatccagctcccatggcccggagagaaatcctagtgcctggacctgagcttgctcagagcttggaccttaaaacagatagtagaagttcaatgtgtgtgtgtgtgtgtgtgtgtgtgtgtgtgtgtgtgtgtgtgtgcgcgcgcacgtgcgcccatgtacacacacataacccaggataacaatacttcagagtcagatacattcgttaactgcagccaaatattaggtcattctttcaacaaagcaaaaccgtttgaaaagtgttatatcggaattatcttcaggtgcttcagagataattgtgctcataaaagccaactgtgtagtccgtcccagaaggtaaaatggtagactcggtaagacttgctttggcaggggctggagggataaaccagttggctgatgcttgcccggcatgcatgaggcctgtgccccacacccagtgccacccgaagtccagcactggggagaaagatgtcttctgtcactcactggcccatggcaggctctcactgatctagaaactcactgcctggctaggtgactgcctggatccacctttctctgtccctcagtgtgaggtaacaggcacacaaagccaccactggcctttctatgtggttgctggggatctccagaccttcaaactgtgagtttctacaagctctgtcgcatcttcctaatccttctcttcttctatttgggaatagtgttcagctgggttttcctgttacagtctccttctttgaagctcttttctgttgcccgtattgtccctgattcttcagttctgccattccattgtctccgtgtctagaatctggaggggaggttttcctctcatgtctgataggcctcttcccagggggctgttggaggctgtgggaacagcatgggtggctgcaggctggaccttaagtgacagggtactggacaggttttcactggggattctgggagtcagtggctggtagttcctttgtcttgggctgttgggttcccttgaaggatgctgcctgtatcctgtcatttgatttgagcaagggagggtgtgtgcgggtgtgtagggagagacgacctggtctcacatgttaagtgtatagatttacatgtaaccctgtctatagtatattgtcagacctgcccttttacttattttactctttaattgtattttttcagtgctggggatccagcccctcagctccaccccttccagtaccttcctcaagccccgtgtcctgtccaccagtcctctccccagcccccttgccttcttttgtgtctgtgccactgcagagcccacagactccatttcagattcatctccagtctctgctggaccactgcccgggtgggtgtttgtggaagcgatgaggagctggaatgggggcacagtcctccttcctgtagaccgcagaccagttctcagcatctccatagtgtagtcccacgggttctcaactttctcgctcctcccaggcagcctcaggctttgtctccttagtggctttgcatgcttccaaattaatcaaaggttttgtcctctcttacaggctttaactctttaaacgcttctctctctcaaggtctcctgagagttaagggacgatgagggaccacttggctggcttgtgtatttgtctgtctgtctcttatctttctctgtctctgtctctgtctctgtctctgtctctgtctctctctctctctctctctctctgcatgagtgtgtatacacatgctcacaggtgcaggggacagccagtcagagatcaatgccaggtgtctttcttattgttctgccctccacctgaatgtggaactcagtaactttgtaactttgtagaggccctgggatctgcccacctccgtcttcatagcgttggggctgcaggtttgcacttctgtgcctaacctttttcctccgaggtgctgtggttctgaagtccccatgcctgtgcaatattctctctctctctcccctgctctccctctttcttccccttcccccttctctccctcccccattcccctctctcctgtctatatttacatatatatgtatatacacacattctctctatttctccctctctccctctttctctctccccgctccctttctctccttcctccaccctctctgtccccctcccccttttgttcctcccccactcccctctctatttatatacatatacatacacacacacacacacacacacacatattctctgtctgtctgtctgtctgtctctctctctctcacacacacacacacacacacacacacatacacacacacagaagagctaaggaagttaacttagctgggttcatgacagctaccgccctttaccttgtatgacttggccacgtgagccccaggccttaggccccaggcaactctccccacccatcctagctctgttttgccaaaggctttccctggccttgctgcattggtctttgtgaaagccagggtgtgtgtctttacttattgtttcctttgacaatgcattggggaaggcagccggccctggggatcctgtctgtctcaccttctactaagaaggccttggccttggggctgtgccaaggtcaagggttcatgagctggacgatcctttagaggaggacaccctcggccgctgctgtttcaagaaaggatgaaaggtgtaggttgacctgagaaatgggagcacaaaagacgaggggtctgggcgcttcattctgctttcagaacacagcccttgtggctgtccaagtatgtgtagctgagactgttttcttattaaacgtctcccctttctaaccctgttctgtgattacagccaccttgtgcctttgcaatatgatacttagagcagccctggcttgaggagattggtattagagcctccggaagccacaaggaacatcagtgtagtccaagcacacaaggagtcaaagatgtgtaaaaataatagcagacccctctgggaagtggggtgcattaggggtgtggtgtccaacctgtgttggaatttgggtgagggctgactgttccagccttctctgtgtgttcccaggatcctcagcaccacctcaagagactgtcagattcttgagttaggcatgcagctcagttggtagagcacctgcctggcacgcatgaggccccgggtcaacagttccatataaaccagatgaggtatcctagtgcctgtgatcctgttgtcgggttatggggtgtcccacatccactccgccacagggctcgggacatgggtggaggtgggacacaggagttttgattgtgcttaccccatgctggcgccgggcgggtgtcaggctatgggaagcttcaggacaccccttttgggggtgggggagcgcagtccaggggacagccggagctggctaggggatctccgggcctgtgtggaggactgggctgtctggttctcaggctcttggatatccaagcaccactgggagccacagaagagctgagaacggagtggggtcccaggggctggatctagcctggagctgaaggggaaaagaggggagaactccttgctaggtcctgcggggaggagagagcccttggcttgtttggcttggcttggtggggacggaggctgggagcactgagaaaccttctgtgggagattaggcagccggctctttaggcaaaggcctgttccattgctccccatggtggatcctgatgaaaaagagtgtccatggttttaagacattcattgtcaatggtggaaagtggatgactgaaaaccataccgtacttctcagggcgggcctgaggttaaataccttttgcagggaggagtgtctgggaaggggagtttattggctccaggcctttaggtacctcactaaaatggagatctgtcttgaggctgtgtgaccacaagtcagtcacatcttctacctgtggaggggcttggggcattgcccttatgtgactgaaggacaccaatctatggagggctgcggcctcatgttaggagcctagtgtcctggagtgcgtcctagtaccatccctacagggtcaccgggatttcaagcctgtgctcgaccaggaaccaggctgcctttcacggaccaacaacatcctggcacttgggaggtagaggcaagagggccagaagttcaaggttacttaggggtttgagaccagcttgagctacacgagaaactgtcaaaaactaacacaaaggagtgttttgccttcactcaaacttccttgacctgggtaggactcagcatctgtgttttataagcctcctagggtggtgtgtgtgtgtgtgtgtgtgtgtgtgtgtgtatgtgtatgtgtgtccagtgcttacttcctggcttccatggacttgaaggtgggtgcagggtggagcttctagggtaggtgggttctactcaagtctggaaggaaggtgtggagaactcccctgaggcctctccaaggccgagttgctctttcacagttggctctgagcctgcagattctttcctccaaacaatgcctgcttctctgcattcttgttccccgaggctgtgctcaaacaatggggctctttcttctccattggagtctgccccgtgggccttatgggtgctgtctgcctgattttatctcatgttgactgttattatactgtgatagcctggctgggcttttcattgtggggataaagggaaacaatctgtctaccatccctaagattcactctgagagaatgccaggcccagaataagggatgggattggtggtgtgggtaggatgtgtgtgtgtgtgggtgtgtgggtgtgtgtgggtgtgtgtgtgtgtgtgtccgtcctggagcacactgaagtggtgtgctgctatagcagtgatggcaggtggcgtttgctctgtaccaagtactgtgctaagcactttggcatgatcgtgggataatttagttttagtccaccctttgactagagagtctcagtttgatcctttgacttatctggtgtcccggcccaggaaactgaggcaagaaagggcaggtgcacgctggatagcaagcaacttctattttattctagcatcatgggtagccatgggttattgaggaataacctggcccctgtgtagtttggatataggttgatgtgcacggggttggggtgggggtgtgtggagaggtggggatgggatatttaaaggtgtggcctatggaatgtgtgaaaagaacccagagcagcattgtgggacccttgagcattttgggtagccacaacatgtccaatctgggacatagagccttgagaactgtggcccacagggagcttgtttctttataagctgcccagcctcgagtgtttcattgtggtaaccaaatatggactagtacctcaggccacctgctgcccgagcctgggatttcacagacctcacctgcttcctggcagaagaaatgttccacagaaaagttgatccctaattcatatgtgcacacgtgtgtgtagagaccatgtgtgcacatgtgtgtagagaccagatctcaccctcagctgttgttccttggtccctctctatcttgttttgcagagaagatctctcattggtccagagctcatcaagcaggctggactgagcttcagggactcaccattcctgggctctctcaccatgtgtgccatggtgtctggctttttacatgggcactggggattgaattcaggaccttgcaaagtgagccctttgccagctgagcttctccagcctccttagtatttgtttttgtttttgtttttgtttttgtttttcttttttttttttttttggggtttttcgagacagggtttctctgtatagccctggctgtcctggaactcactttgtagaccaggctggcctcgaactcagaaatccacctgcctctgcctcccaagtgctgggattaaaggcgtgcgccaccacgcccggcttgctttttttttttttttaaataaattgacaaaatgacttcctagtctttattactgctgtacttctcagtgtagttgaaaatgttgagtgtgttatacggcaggaattctgtgtattgtggaaagtggaaacagcgggggacattttattcgcttgaatagataaaggtaagtcagccagagatgagtcatcccaggtttgagattgattatcgtcaggaatctctctggacatttgttaataatgtatcagaggtgagcccagaaccagagacgccgggaactttcttcagatgatctcacagaaggacagatgatgaagacctcttcctcctcctcctcctcctcctcgtcttcatgtgtgtctgtgtgtatctatctctgtctgtccctgtccctctcctctcctctcctctcctctcctctcctctcctctcctctcctctcctctcctctcctctcctgtccatctcttgtaaccaccccaaacaagcagaatataccccagggaaactgcctaacttttcccataggtgcaagaaaagttttggaaggaaaaaagacagtttaattgagacatagttgctgtaccgtgtagttcatttgctagagtacatcattcaggctgtgtggatggacggtcactgggtaagatgcttgctgtgcaactgtgagggtctcagcttagatccttggatcacgtaaactgactcctgagattgtcttttgactccagatgcatgctgggacatgcttacctcgccccatgcacacatgagtatgtgtgcatacacatcacatagtggagagatatttcaaaaagacggatttggtggcttttagtccattcacagagatacttcctagagatggagtcgtgacatagaccctcctgtaagcctgagttcttgcttagtgtggtgttctcagggttggtccatgttgtggtgtgtgtgtgtgtgtgtgtgtgtgtgtccatcatgtctttacagaggagtattccactgtgagtgtgacatggcatcttttagctgtttctctttttttgtctactgtgacaagctttgtctgacacatcttcctcttggaatgagagtatttgtggggtgacctcattctgcccaggctttgaagaactgctatggtgttttccaaaatggctggctatgccaagcatgccctgccgtcctgacgggcagcgtgagggagagagctgtgtgctgcctgcttccccgccgacacttgtgttatccatctcactgatcaggcccatccttcagggtgaagtggagttttaggatttttattttggtttctctgtaagaagccgggcatctacccaccgacgtttctccctctctcttcttccctttagcttcttcaccactgtagcccaggctggcctgggtcctcctgactcagcctctcaatgctgggattgtgtgagaggaccacgtgggctttgagcctctttccttggcactcactgacttagaatctgagtaagtagcattctacaatctcccttctgtaaatgcttcagtcagagcaagttacaggctttccccttcttgctgacttctaagttgtattgaccaagactagttgataccaggttatttcacatgggcaaaattagaaattacaaagtctgtctgtctgtccatccattcctctgtccgtccatccatttatttctctagtttttttagactgagtttctctgtgtagccatggctgtcctggaactcactctatagaccaggctggctttgaattcagagatccacctgcctctgcctcccaagtgctgggactaaagatgtgtgccaccactgcccagctagaaattacaaagtttaaaatgttgtcttttttgttctcatcattgagatatgtaggaaaagagtaaaaattcccatgttttaacactgtcccaaatggagtagtaacatacagtcataaaaaactgtgtgtagccgggtgtggtggcacacgcctttaatctcagcgctcaggaggcagaggcaggcagatttctgagttcgaagccagcctggtctacaaagtgagttccaggacagccagggctatacagagaaaccctgtcttgaaaaacaaaaaacaaaaaacaaaaacaaaaaaaaagtgtgtgtgggtacgtgtgtgtgtgtgtgtgtgtgtgtgtgtgtgtgtgagtacctgtgtgtggggacacatgtgtgccttagcatgtgacagtcagaggacaatgttctccctaaagcaccgtccaactcaaccccccttcctctaccactccctcccttcctttcccccatctcctcccccttctctctccttccttctctttttctttttgaggcagggtctttccctggcctccaactcaccaagtgagttggtgtggccactgagtctttaggacaccatatcagatagttgaaattcatgtttgtggggttttgtttgttttgaggtacttctcacttgctagccaggttctccatccctgagtcacatctccagtccttgaattcacagccctcgctccccacccctcccacccccgagacccagttgccaccatggatggaaccctatccctttaatcctttttaaccgcagcctttccatttataataccagcattttaaaaataaaaatcgggtatgagaggcagaggtaagtactggaatcgccttccttgtcggagccagtgtcgtgtggatttgaaccaacctgtaacctgagacccacacagctgctattaatatagtgcggagccagctgaagggcaccttctgtccactgggcccagctgggtcctggcaagccatgctcctgaagactggaacagcgaggcacagtaccatacagtaattcagagtgctcccactgtccctgacttcaagaacacctgggattcccagtgctacttgggatctcaggagaaatagaatattcttttgtcaatgtagatggtcatattcaccacagagacaatagttggctgacaggcatgttccctgaatggatgcatgcttggctgaatgaatgaatgaatgaatgaatgaatggcagtgtcccacactgattgtatacccctgtccattttctgccatgtgttttccttcctgtatggaagccagattttgttccctcggcattttttgcagcttgctggagtgtaggttgaacaacgtgggggctgggtctttccttagcccaggctggcccatggttttggcttgggccatggtgattaggtgaggggtgctgaagaccccccccccccccatgagagggagctgtaaggagattctcacaggactgtgggtgatgttctgtcagcttccttccctctgacctgagaagaacctgcttcaaggtgaaccctgactgctgcttgtggcctgagggaagggaggggcgaacatggactctttgctggctccatcctgggcagattctgtatcttccctccataaagtcacctgaaaccttagcacttcactgagccgcctcaccctcagctgggcggtttgtgtatgctaatgaatcagaatataaccaacccaaagaaaagttcaccttacacgccaataaaactgaacatggtgttccctgagcctcctttcaaagctgaggtccagcctcacctcgtcctccaccttcctggagctgccctttgcccctagttggttacccagccacctttgctctttctgggctctgctgtgtctctgccacatgggcagagacacagcagtttggttagagagttgggcagtgtccagttttagggcctctgtcctcatctccctggctttgtgagagggggaggtgtagcttttcttaccaagtttgtctttcgtttttaaatatttgtgtgattgtatgtgtgtgtatgcatgtgtgagtgagtgcgtgtgtgtgtgtgtgtgtgtgtgtgagcacacatgtgtatgtgccttgtgagcttgtgagtgaatgtcatgggtgtgttgatgcctgcagaggccagaagagggcgtcagatcccctggaactggagtgataagacagttgcgagctgccctgtagttgctgagagccaaatttaagtcctccgcaagcctgagcggtctctccagtccccgtgcttgtctttattgtggtgactgggaactgggcatagcctatgaaatcgctttgtcctatctgcacgctgagggaggagactcctaagtatagccttgtttatttaaaaagcatatacatgtatttatgtttgtatgtctataaaggtacacaatcacatgtgtgttaagtgcaagtgtggaagtcagaggacaccttgtgtgagtcggttctctcctactctttgggttcccggaaactgaacctctgtcatcgggctcagcagcacatgacttgactagcatctgaccggctcttgcctgttgtttctgggtcttttgtattgttctgtctttgctcaagtctggggacaagttggcccttctgtgcctctgacagttgtgagagactcccgtccagttcttccacctgagtaaggcttgagtttaaaaagatacaacttgtctttaccagtaggatttctggtgggtggtctttatagattctagtaaaatcacagggctgttcctgtgtggtcctgtcagtagtttccaggaaacatgtttctgtctgtttctgtgtttttagcggtggggtacgagataactcgggacaatctcctttactgtttgtgtcacattttaaagagacaccctactcagaaagcttagcattctctcaggaaaggttgtggtttcagagtctccctgtggtgggaacacggtgggcagggtgttgagtggcttgggttactattctggggtcaccctgagtccccacatcaaggccatggatttgggagggacaaaccagctaattccttgtgacacaaagtgtacatgtacatacacacgtgcacacgcacacatgcacacgcacacatgcacacacacagacacacacacacacacacacacacacacacacgcaaccttctatgaggaatacggtttctttaaagttctctgttttagctggtgtagtgttgcacgcctgttatccagggactcaggaggatcaggtcaaggccatccttggccattccattagttgaaggccagcctgggttacaggagacccggtccccagctgaacaaacagaattccggtcttggcatcccagggaaccaagccaaggagaaagatgccaatggaggcttttgaagaaatcccactggcagagaacaaaacacaggcaggctccacctgtgcagggctttgcatttgcaattgtggattgttgtgtgttggaggaattaacttctaagaagaaaggctaagcagggaactggatcctacttgtgggaagggtgtgcctgtttaattagacagggttagtccaggttcactgaggggcagatgtgcctgctaagatctgagaatagagaagatctcctaagggagaaagtgagaacagcaggatgaagtctttaagacttagtttttatttttatttatgtctgtatgtgcttgcttgcacatgaatgcagcgccacagaagccagaagacccactgtagctggagttgcaggtgatctgcctgatgtgggtgctgggacctgagctcaggtcctttgcaagactagctaactctccagccctctggaaaggcatctttttttttttttttcctctttggtttttcgagacagggtttctttgtatagccctgcctgtcctggaactcattttgtagaccaggctggcctcgaactcagaaatccgcctgcttctgcctcccgagtgctgggattaaaggcatgcgccaccatgcctggccctggaaatgcatattaccatgaacacagtcacaccactggtccgtctgcccgtcaccccttccagggcaatctcatcaggactaaaatacaataagaccatctcagtggatttctggacttatgtggatggaccctgtgaaaactggagtgcttgcttcagaaggcttggaggttgacctaaagtttattgtatttgttaaactctttattatggtgtaattttggtttaatagaaaagtcaagagtacagacagttcccatggacccattacccagcagcctcctgtaatgctaacatccagtataaccacggacctcagccttgtgagagccatgggtgttctcagacatgcacactgagtgtgaggcccgcagccctggcattgccagccctttggaagtactcacgcttcacctcgagggtccagcgtggactgtgaccaaggagaagtctgtcagggagccgctttggagccagtggtgcaggcgggagatacgaggacagtcagctgtctggagagcccggggtcatgtgaacccagtgccacttgaactttatttagtgaataattggcctgagatgcttaatatagacctcccggcaatcatgtgagaattccactcggccccagcacaaggacatcagggaggttagaaatgcgctcctctgctggtgtccagcagaatcacttgtgttccatctccttcgtggaccagaacagcatcaacggtaaatgccagattgttcatctgactcaggagcaaccaggctgtccatctgtctccacaccccatacccacccattcatacatcccatctgtccacccacttacccactgtgctggatagtttgatgtcaacttgatacaagttagagccatctgaggaaggaacctcaactgaggaaatgcctctgtaagattgggcttcaggcaagtctctagggcagcggttctcaacctatgggtcaagacccgtttggcaaacttctttctccaaaaatatttacattaatgactcatgacagtagcaaaattacaattacgaaataacaacaaaactgttatgttcgggggtcaccacaatatgagagactatattaaagggtcacagcgttaggaacgttgaggaacactgctctgtcctgtagtgtccatggctcctgcatcagctcctgcctccaggttcctgcctggtttgagttcctgtcctggcttccttcagtgatgaacagggatgtggaagtgtaagccaaataaaccctttcctccccaagttgctttggtcatgatgtttcatcacaacaattaacactaagacgcccacccacctaccaccttctgggtctgtgtgtccatccatccatccgtctgtccatcagtccatcctttcaccttccccattcatcctgctatcctcagctcacaccctctatccctctgccaatcttcttgttgttttgctcagtaatgctttcttttagaaattgctcagtttccctggaaaggggttattgaattccaatgatggctgcccttgttgctctggagggaactccccacttccagggctctgtgactccatctttggagaatgctgctctctctgtgagagggtaaaacagctgctcctggctgaggctgctcagctggcagaaggtggagcttcaggcaaagtcagagccgaggggggccctgccctgggcgtggcaggaaccctgtgttgtcgggtgaggtttggacagcaggctgtggctcagctgttaggatgcccacttgccatggttgacatggactctcctgaagttgcgagcagacacattcattctgtggacatctcttgattccttggtgtgacagagaggtaccggtgatagaggtgccagggctttgggcccatttggctgaggatacattgaaattaatattttcattctataatgtgctttctgctcaaatatgagcacttgagttctttcccacccggcacccacataaaatgccaggcatgatggtggcactgtcgtaagttacgcaccagctcacatacagcgtgtgacgctgaggaacagcccttctgaggcttgcttaggatgacgtcactgaccacccacccttgttagttgtgtccatcttgtctctgtggctttaaacaaggtattttgctgctgagaaagtgtggtccgtccaattccagactttaacaaagaccgcccagtctgctgcaaaatataatttcccccaatgaagggttgctttacaagaaaacagtgcgtgatagttatcccttgtcccttgccctgcctggacttcattgcagtccctcccgaggagttctatgtccttcaaaccttgcagttggagataggggtgtgtagtgcacgctcacctctggactctcaactctcataaccaccttgggagatagttgacgttgttccttgattggcttattgagtgactgtggagacagggtcttgtggtgttgcccaggctggcttcaaattcatgatcctcctgcctcagcatcctaagtgctgagattgactataggtgtgcaccaccacacacaacttgcctggttttagagctagaagatacattttacgattaagaaactcaatcaaggccacactggtcatgagtagtgaggtcatgctgaggcagggtttcccactgaccagggctcagcaaatttaccattgagccagacttgtcccaccctctgttgtacataatgctaacagggacagccatacccactgatgtatttgtcagtggctgaaggggtgggccgccctcctgaagggctttgggagtagcaaaacactcattttcgcagcaaggctttagggttccgagacctaaggaaggtccagcatgcctcctggagggtcaggagtgttaggccgcaaaaatgtgatccgctcgcagacaggcccatgaaacagatgtttggacatgctggattacccagaggtaattcctgagggctctagaatgttcctggccggaatctgaagagctgatttgtgattctagactcacaggctcagaggatggttgcctgatggtgatgtcatcccgggaaacaggccctggcagaggcaaacggttcaggcagtttggggacttcctaaaataacaaagctgaagtgtttgcactagacttcctggaggtgaaagactcttctgaaaatgatctaaggacgcgttaaaaaaaaaaaaattaggtgtgcgtttttagggttaagtgccctgcgttttttggtgtttgattctgattggagatgtctgaatcgtggaggtgacgaagctgtgtcttctcagccctgttgctctgagtgatcccggccccacgggttgcagctttcttgtgtcagagcccgagctttcctgtaattcactgagcttctcctgagggctttgtctcaggcagcatttccatggtgggttattggcctacttggtaaagaccaaagtctttttaacagaggcagtcccagctgccttgggcagatcacacagtgcagtattgccttccagaggtgaccagcctgctgagatctgccccgcctgccccttcctggtgtgagggactgtttgcattcacagttaaaggatttgcttactcccgcccaaaacacaccccctgcctctccaactaatgcctcctgctgaacagaaaaagaaaagcctgtttgtaagcagcatatttgcattgtatacagcatagcttgtaaatgtatatataatatgtacattagtgtacatgtatactactgagtatatatattcactgagtgtgtccatgatttcagcatcagctccttccctctactgaacttaggaatttgaagtttatttcttctttagaaatctcttagcacgggcacacagaatcacaggtttaagcatctaggctaggttagtccttctgaatagctcactgctttgatgattaagttggtctcttgctgctcctgatttcagggtgacttattttaattttgagatcatatgaaacatgaatatgatctaaagtccagagtagtaaaagaggtgaccccataccctgttcatccctccactctaactccgcccagttgtcagttctctgttgcatatgtgttgcattgctgattacgtcatccttacatgttagcatcattgcttatgcgttatcttcattgcttccgtgccagcattgctgcttatgtgttagcactgttgtttacgtgtcagcattgttgttacatgttggcatcattgcttacatcattgcttatgtgtcagcattgctgcttacattgttgcgacgtgttagcatcgctctttgcttattagcatcattgctgcttatgtgttagtgttttttagttttcttgcacagaggacaactcgcaggggtcaggtctctccttccaccgtgtggctcccaaggatcaagcttggcagactctacaggctgagcagtcagtctctctggcccgacagccagctttttataccttcattattaacttagcagcaggtcacaggacttttccatcagtgggaaatgatcagggaaaaatatgtttttagatttatctactttatgtgtaggaatattttgcctgctggatatatgtgtaccacaggccagatgagggcctcagatctgggaccagagttacagatggatgtgagctgagaatcaaacttgggcccacttggccaatgcctttaacctctgagccatctctccagcccttaaacaggttttttttttttttttccccaaatggatcttcagtggctcaaaattgtgctctttaaacccaggacacagctagtaacatggtcgaaaggttaagaatgttttctgccttttttttttttttttttggtttttcgagacagggtttctctgtgtagcccttgctgttctggaactcactctgtagaccaggctggccttgaactcagaaatccacctgcctctgcctcccaagtgctgggattgaaagcatgcaccactaggtccaaagttttctgcctttttatttattaacatatctcattctgcttcttagtatcttaatttggtagtaacatgcagaatttaattttttcatgtatcttctacctggctattgttcacggacattaaaggaccttgccatctgtgctactttgttttatctctgtgtttccaggtccgtggttgtatctgtggattgttactactactacttcctcctccttctcctcttcttcttctgtcttgtttttcgtttcttgagacatgttttcatgtagcccaagctggcccctgctctttagcggaggatgaccttgaactcttgatcttcctgccccccacctctctagtcctgggatggtaggtgtgcgccaccaagtccagttgttccagtgctggacattgaacccagagcctcagggctgggctactgctctgccacagagctgcatcccaagccctaagtttttcatcttcaacatttagcatttcatggaggtgtgggggtagagcatctgggtttgtaaaaactgagcagctgagtgtggctgcagtttctctgagcaggggtcagagtgggcggctccctgtctgatgtctggggagtgcttgtgccaggagcactcttgcctagggatgactaagtcctccctgctcagcatccctcctttccattgaaacattgtttctccctgccgttttttttttttttttttttttttttttttcctagctcaccatagtctgttctgtgctggctcagactgcacaccccaaggcaatcacgctgtcctggaagtgtgtgattgaggccagagggccactgtttactgtgtgggtctgagctgttggtccctagccctgctgctcatctcagtaagaaagtaatttcttcctggggactgagctgagcctggtgcctcctttgcccttggaagcctcagtctttgcctgtttcctgggttttcctgtgccgaggttcagggtttctgaatggtcccaagctctgctttagataaaatgctgaaagtggctgaaaaacccgaagctgctggctcgccttcttccaggacacctttgatgggggctctcgaatgttcctcctttgccatcaggcaggatcaagtccagaatctgttcctgcaatccacggagaaggcttcctggcttctccaggggcttcatttagagctagtagatcaggaagataattatctccacacccaaccaccacacactcaccaggggaacttttgtgtggtgtttgcctataaatcagagaggtaaggggtctgtgtgctcagcgggggaggcgtagtttactgggtgtccactgtctgtgggaaggtggtgtagctacgttgggttgcttcctctctctgtatccgacactgaagtcatagctgagggcaacttgtgtttccatagctgtggaatctgttttgaaaaacaccaggctgggattccactgtagttcaggcacattgagggccaatgtgcaaatagatatgagttttaaaacaaactcgcagtccctttgggatagctatgtgggggactctccctccctccctctctccctcctgttttcaagtcttgaattgtgtagaattctgtgaggagttgagtgtggaggtagcaagcctgttactcaggaagcccctcggacatttcctgctgtgacaatgtatgcaccattgattgctgggattgtaattgacctgtcacactctggtaaggcagggaggccagggtgtctctttttccacaggggcaggcataaggatgaatcactgaagttgttctataaacattgagtttactgtgttctaagctctgagggtccaatggcgacctaatcggatggaagcgagccttatataacccactcttagctgtttcatacagagctctctgaagtctgtagtccctgattttaggaaaatgcccattaaaatatcatggtctgttttcccctcaggttctgttttccctctgccttgtgagggttttatctctggggtaactgcaaagctgtcatttatggagcacctactgtatacttatctcacttagtcctcgtagcgccccctactgtttggcatcattactgctccttgctttgtcgagaggaactaggttcagtggcttccctgggattagtgcttagcactgagaggaaacaccttgggaaattagtgtgcgtcccgtgccctcggagaggagccctgctcacggccaggttgttgggatggtgtgggtgtagacaagtcaggtgactcagcaggagagaggaatgggctgaagtgtggggttggaagctgccaataataaggaagggtcacagaggccgccgcctggggctctgtgggcggggatagtggtgatgtaactctgcctggcagatggtgagttacaccatttaggttttactaagtgttagttctttgagattttcatgcagcctgttgtgatcacagtgacccttcctagcccacccaacttgatgctttttttataaaaaccttcaagattactttgtgctacccaaccagctgaggtgtgtggtcttccattgggcacatagtcaacttaacaagagcgaaacaattagagaaacctatcccccccaactcccagcagctagcagttgctaatagctctgtggctaaggggtgggatcatgtgcccgactcccctctccgtgctgggatgttgtccggcttggacttgtgtaggtttgtacatgtttcttccactgccgtgagctcacaagtccatttgcatgccgtatccggagactgacttgtagccacactgcttttggctggcacattcttccagctccccagcgaccctacgccttggatactggggtatgtgtgccatatatgtgttctcttagggctgagctctcaacagtctcttattctctgggtagttgtgtccctgtgttaatccctgcctgctgcagatagaagcatctcagatgagggttgagagaggctctgacctggtggtgcgtgtggcgaagttctgcatcttctaatgcagatagacacaccatgccctgcaatgggttgtgagctgtgatttcacactgagcccgtgtttgacatctgttcttggtgacccagtttctctgtgttgctatcgtaaggcacaggaatgagggggacaagttgtgttgtgtggcccgactgtgtcttatttaattgacatctgtaatagataacaggtttctctgtcttcatatgtgcttcgaggaaagttaggtcttagaacgaacttctgcttttccttagagaacaactagctgtggaattacttttaaattttgtaagacttattttatgtatatgagtgctttgtttgtatgtatgtatgtatgtatgtatgtgtgtttgtatattgtgtgtgtgcatgtgtgcatatgcatgtgtgcatgtgatggccttggagatcagaagagggtctcttcactgagactggagttacaggcagtcacctttgtcttagttagggttttactgctgtgaacagacatcatgaccaaggctactctttggacaatgtttaattggggctggcttacaggttcagaggttcagtccattatcatcaaggtgggaacatgacagcatccaggcaggcatggagtaggaggagctgagagttctacatcttcatctgaaggctgctagcagaatactgtcttccaggcagtttaaatgagggtcttaaagtccacacccacagtgacacacctactccaacaaaaaaggccacacctactccaatggggatacaccttctaatagtaccactccctggactgaacttatacaaactatcacacccaggttctctggaagagcagccagtgctcttaactgatggaactctctctctatccctttgggattgctttgatctaagttcctgaacatcactgaagtgagcagcacaggtcagttaggaatggaaagatgccagggtgacggttctgattatcattgccattttcccggtaacctaaagcctgcttgcttatttatttattttcttgtgtgtgcatctatgtgtggagggagcatgcagagcatgtgacatgtgtggagctcatagaccaactcgtgggacttgcttctcttctccaatatagtcccaggccatgaggctctgccacaggtcctctgtgagctgagccgtcttgccagcctatataatttttcctggtaacttctgtcgttgaatcagctttagcaacgttttatactgtttgcctttagcttttgggtgtgagaagatcataatttccttgcacgtgctcacttgagaaagctgttttcctcgtacagtggttctttttgttgtcccagcatgttctgaaaagctaagatcctacacacactgtaaggaggaatgagatacttgacgtttcctggatacacctcaggctatggttttattagtgattttaaaaaaatttactaagcacacatgcacacttttgtagtacacatgtgctggtgcgcatgtgtgtgtctttgtgtgtagtacactcaggacaacttggaggaatctcttctctccttctaccatatgggttcaagggattgaactcaggtcttcaggcttggcagcaagctcctttacctgccgaaccctcttgccctccctgggctatagaacttatgacttcaaacctcagtttttccccctacagccaatgggaagagaatgaatgggcttgccatcctctggctgctgtgaattaattagggttggcagtgcccccacctggcagaacccagtcatgacatgatgcatgcagcctgtatgcccttttttgttggtagggcccttgtgttgttgttgttgttgatagtttgagtacattaaaggctgcaccatggacatctgctcctaccctctcctagccccaccccatgatcctaggtgtccaccctttggagttgattcttttgtcctgggacttgaggctaagtagccactgggtgtggttgatgattaactttaggcccatattcagagggccgatgtgacaccccctccctgccatgccagcctcccgtagatcttggcctgcatcctccccagggatgcagtgtcccttccaaaaaatgattcctactaggtagactgcagtattccgcagcccaggtccctgagcccttcttgggcagaacttttgttttcaaggtaagggctttccagcctagcatctcaggaattccatgagcactttgcagggatctgtggacgaggtagtcattcttgccatctccctcccagctctggccagcctccaggttcctcctccaatcctgggatgtgaagggtttaggatgtggctttctgtacgcagcttgcagttgggcctggcatagtatcactttgctgggccttgtaaacctcctccctcctgctgcctgccaggctggccttgtgcccctcgattggcaggattaaatgtctgacggctactcttgtcccccacagtgccaccttgcaagagaagcccctctgtggggtccccgaatgtagtctctgctgcctgtgccagtctgtgagtgctgactcttggcggtcaatggccaaagtttgaatctcctgcctagcttctaggggtcagtgacacatgtctgtcctgggccaggcacgcttgcctcactaaccttgctaggtgttggaaggcttgtgaaggttccactgcagaagaaagaggagaagctggctgcctcaggctctgtggctggatggcctccctgcaggagagggagctatttatggtgctttaaaaaatctgctgctacagctaaaagagggttgggactgttacgtaaggctgagctgctctgggtctggtctcattttctccctaattctaggagacagagtcgaggctgggctgcctctcagctgcaacagaattattcttggacatgggggttggtcatgtgacagcgcctctcattcatgaaaccttgatgcatcagtggatcagccttccttactttgcgggcctgtccggtgtcaccgtgtgtgttggggacattgcttctttgctacagaaggatctaaaggggtctggcctgggttggattgggccacagtcattcctttgttattcttgagtttggggaactttctttttatttatttgtttgtttgtttgtttgtttgtttgtttgttttttatttatattagtatactgcagctctcttcagacacaccagaagagggcattggatctcattacagatggttgtgagccaccatgtggttgtgggaattgaactcaggacctctggcagagcagtcagcgctcttaaccattgagccatctcttcagcccagaactttctttaagtgatgttggttgtgttattattgggggaggtaggctctccagagctagaagaaggcatggctttaaggtggcactaagggctggggaggtgacccagccagcaaagtgcatgccatacacacttgaggaccagagtttgatcaccagaaaccaggtacaaaagctgggtatatatggtggcatggtattccagtcccaacccagggagacggagacagtagacagtggggcggccagccagccgcaccacaagctccaagtcggtgaaagagactccatgtcaaggaggcaggtggcatttctcaggacgacacccagaattgacccctgacctccacatgtatgcacacatgtgtttctacacaaaaccatgtacacacacatgcataatttaaaaataactgcttcgaggtgctggggagcccagtagtgttctctgattgtcatgaggccctgagttcagattcacagagcccatgtgagagccagccacagatggattcctggcagtctctggctacccagtctagctgcaatgatgagctctaagttcagcaagagacctttcctgtcccttcacaggagataaataaatggcattgagcctggtgtggtggtgtaggcctgccacctcagcactcggagggctgagacaaggggattatggattccaggccagccagagcctggaatctctggtgtaagggtggggcaaggcactcaggacagctgctgcgcgtggctgtctgtccctgtgcaaggctgtcctgaagtcctcctagcagaacctgtaacagtgtccacctgacctctgctgtcctcctttgttccttcaagggacccagggaccctcacaacagtcataagaagtcacaacagctccaggaacggttactgaaactgtcatctccatttctgtgcctcggttaccatgatgatgcttcaaccttctttctctcccttcctctctccctcgcatccctgcttctgtgtgtgtatggtgggggttggggaacagaggaccaggactctggcaatggtgggcaagtcctctacctactgagctagatcagtagctctgttctctaggtagagctttgctgtgtgtgacccaagccgggctccagtttatcctcctgcttccgttctctaggtgctgggattacaggacaggcctgcagcagggcacccgccagccacgttgacgttcagagggtgtcatctgatgtgggggtcctcacaacttggttacaggatgccccgccaaggtgctgttaaccttggtggtgtctgcacaggctgacgtttcctgaagagaaactcttgttagccccccacctgcagtgactcaggatgaaccgtgaatgcacccctgaattccccacgcctttctacaccctctcatcaagaggatggttctatcctggagtgaccctggagtgaatcttgggtagcgcgagcggcttgttggttgttgacttcttggccacggtgctctttaccccacctggctgaaactcatctcctgttccactgttcagtgttggcatgcagctcccactagccacttgttatagagccagtggactcatgggagtgacaggaagggcatcgaaggtcagagagcgctaagatggggagttttgggaggctttggctactggagccccacatctctgctgactggacaggtgtaggcccgtgtgtcttcatggagttcctttgattctgctatggtgggaatgccatcttatagatccagggtggagggaatggtttgtcgtgagtggccacatggtgtgcctgactctccttaagtccagcaccactcaccctgagcagtaacatatctggagccattcaagcaaggctatgcttctggccaggttgtttggcttccctgagcccagattctcccgaggaaagcagatgctaatgctgctcgcttcgtgtaagttacgagccttaaacaaggccacaccttccattccgggcagtagctcagcttccagtcctggccgtgccagggttgcctggactttaaaatagtacaagttagcctcagcaccttctgagcagctgacagtaacagtggcaaccgaaggtttgtcatggtggagagggaggcaccagcaccccacacagtccctttgtcagctgcagacacagccagcattgctgctggaggccccaagagtccagtacccccagggacatccgctgagataaagtcaggttcctggctacttagcagaaaggaatctgagcatgaatcagggtgaagcaagtgaaggaatcagagagaacatacgcttcaagggaaaaatgaaatgggatgggggggnnnnnnnnnnnnnnnnnnnnctgtttaagggctggagagatggctcagaggttaaaggcattggccaagtgggcccaagtttgattctcagctcacatccatctgtaactctggtcccagatctgaggccctcatctggcctgtggtacacatatatccagcaggcaaaatattcctacacataaagtagataaatctaaaaacatatttttccctgatcatttcccactgatggaaaagtcctgtgacctgctgctaagttaataatgaaggtataaaaagctggctgtcgggccagagagactgactgctcagcctgtagagtctgccaagcttgatccttgggagccacacggtggaaggagagacctgacccctgcgagttgtcctctgtgcaagaaaactaaaaaacactaacacataagcagcgggagggagggagatgggagcaatgtgcttaggaaaagcatgcctttataattcatatatatatatatatatatatatatatatatatatatacacacacacctttatgtgtgtgtatgtgtgaatgaatatatacatatatatacatagctgtaaacttcccaagaaagctacacctaggtgtctttacattttgtgtgtgtgtgtatgtgtgtgtgtttatgttattcaaaggattcagtttacaacgaggtttaaagatgaagccaagtatgaaaagtatgtaaaacctctatgaactggcttacttcccttaaaagcctccagttgtaactggaactgtaaggtggtcttagggagcatgttgtttagattcagggtgacaggagggcaaacaaaggtcacagacacaccatggcccaaagtcagcacagcttgttcatttcagtgtccctgtctgaggtgtctttagggagacacatgttatcgctggtgattttggccttttcggctgactgtgctgaggtttcctggcctagcctgcaggaagggtgacctagatcccagggtgaaggactgttcctctacccttgtccctccatttcccctgtcatgatcctgcctcatcccaggcatatgcatatcccatatggaaccagggcttccagtgactgccctccatgcccagcctgaagactggctggccttcttaggagcttgttcctaaactagaaaggagaacacaggctctgtgtgttcagcctcttgtgcttatgcccaggcgactctgggcctttccacactctcagattgggaccacctcctgtccttatgcccatggcttcacaaatgcaggtggcacccctacattgtagagacccctgagaagcccagggctccagccaggaggtggtagctgaggggagacttcaccccagtgaaggttaggagggaaatggacagaaaacacaggaaacagatattggctacaaaaacataagaggttttttttctgtcctggcagtggtggcaacacctttaatcccagcacttgggaggcagaggtaggtggatttctgagttcgaggccagcttgatctacagagtgagttccaggacagccagggatacacagagaaaccctgtcttgaaaaagaaaaaaacgaaacaaaaaaaagaggtttctctgaggtaaagtttggagttgagggagcagaaaccagagaaatggagaaatccattgtatgatattctagaacagaaagggacatttgtgcctttgcgccttcaccccctggggtgtgcaccccccccccccgtgtgtgtgtgtgtgtgtgtgtgtgtgtgtgtgtgtgtgtgtgtgtgtgctcttccccctggtgtgctcctccccctggtgtgcactcccccctggtgtgcactcctccccctggtgtatgctcttggcctgcccccatccccattgttatctttctggcacccctttgtctgccaaaatggccaggctgcagaacctctcactcctctgctgactggggtcccgtcttcccctggctccccaggctgcagccagtcaaccgcacagcccacagtgtgctgccttcacccatgggcaggcttttcaaaagcccgtttgtttcctctatctggaagaaagccctggctttgtgtgtgccaggctttgctggggccagagacatccaggatcttctcctgagcctgtttgcgtgaggggaagctgggagacgcagcactcagtggcaggaaacggcttcacactggtcccctccgctgactctgtgtggccccttatttccttacttctaagtggggttgctaaacgttcagctaagaagagttggccacacagggaggttagcaacggtgggcagctccccgtgctccctgccagcctcagaagggccagtagtggcacacttgtgtaactgtgtgctgccgtagagagccatttcaaatgtaattttagggacatacaaggctcgctttcttgggcagtctgagtaattttgagagtggtgactggcatatgagtttgctgtatgcagaacacagggttgatatgccttgatcactgctttgttatcatctgctacacggtctctgtctcgggcgtgggcacaggagggctgggctcagccacctgcagggatccagcccatgtctcagcagccggaagcttagcgtcctcttcctgtctccacagatggtgcctggggctgttggaacgtgtgcactatgcagcctctgaccagttttctgctttgcgtgtgtgtacatgtgtgtgagctacccatccccgcctcctcagcactagcttacaggctccaccacccgactcttgttagatgagtgctggccatagaactgagaccctcccaacccactgggctgcttccccagcccttggcctcttctggtgtaccatcctggctgtttgtttatttttgcttttagagtttgtagacatcttgagtcgttggcagaaagcacagttagaaatactgtagtaagggtttccgcagactcacaccctgaggtgggctatttccccttcttctgcatcccccccccccccccccgttttccccagcctgggactctattcaagtcagaaattagatgggggagtcacatgggtcattgggtggctgagtgaggctcattccggtcgttaggaggttaaggttaaggctgctcttccagaggacccaggtttgattctcagcactcacatagctgctcactgagacctgtaactccagatctgtgggatacatcttctggcctcccccggcactgatcaccctgcagagagacatgtggcaaaaaacacccgtacacatgaaataaatacatctttaaacatctttttgaaacaccatactttttttttttttgtattttgttccctttaatctcacttttatgatttttggattttttttctttctttgtttgtttgtttttctggaactcttcagaactaacctggtggtggatcatttcaggttaacacaggttcccagagtgggagctcagcctttccttctcccactcctgtgaagatgtatacagacatgtgtcatttgttagactgttcctggccagtcagtgtccagaccagagtcagaacacagccgacacacagaggaagccattactcgctcaagactgccagggtagcgccagcgtcccttagcctcatctaaagaattctcaaactaaagcaccgagcatggctggcaacctgtggaggacttctggcacgccgacttccagccctagtacccagaatgctttgtgctttctcacgaggctgcttctccacttttctgtgcatctctgccgagcaggtgtgatgggtcagttgggttccacatgtcatcctacagaaagcacccatgttccaggcctctcttgcttctgtttccttagtgtacgcagaacctccgcctcttcccatttcatactttctgtccacttaaattctttctgcttatgtgtgtgtacctgtgtcagatgatgtgcccatgtgcctgaagtttctgtggaagccacgtccgatcccctggagctagagttataggaagctgtgagtatcctgacacgggtgctggaaagagcgcaggacctctgcaagagcagtagatactcttaacggccgcatcatctctgtgtccgtgcacatgtgtgtgggtgcccatggaggccagaaaaaaaagacaccagaaatcctagggctggagtgatgtaatagatgcctgtgacccacccagcatgagttccgggaagagcggtacacactcttaatggctaagccacatttccactctctttgaacttctgtccctatgtatactctgtgtgtgtgtgcatgcatgtgcaagtgggtgtgcaagtgtgtgtgccatggcacagagatagaggttaaaggacaccttggatgtcagacctcaccttctactgtgttggtggaggatctgtttgttgccctctgttcactaggctgtctggcacgtgagcctcttccaccgtccatcttgctgtagaaatgccggattatagacatgaactactgtgcctggctttgacatggtgctggggatttgaactcaggtccttgagtggcaagcactttatccactgagcctttgtcattcaacacacccctattatacacttttgccatttgcgcgcgcgcgcgcgtgcgtgcgtgtgtgtgtgtgtgtgtgtgtgtgtgtgtgtgtgtgtgtgtgtagaggtgggtgggagggagaggacccttactgaataaaaggataacttctcaggggctaacactgtcctgagaggtagcatgtaggttgctgttgaaacagagcaactcttttcctatagtcagatttcaatggcagtctgagttgcccaatgggactgatgttgctgtagcccgcttatcacttaccattcccagggctctcgttcattgtctttggccctccccaggagcctgtgaatgggcctgatgtgttttgtttttgtttttttaaataaggtcttaacttaccaggttctcaaaggagttcactcctatctcactgtagcttaaagtgggcaccgaccttaaagttctttgtggacttgcgtttagcagaatttaatggtgtcatttataactgaatgtacagatgaccatatcgcctcgcagtgtcagtttgcatcttcctcagagcgtacactcgtgctctgcccacgatgacttgctccatgcccgccctggcttctccctttgaggatggccatgcccttctagctgaggccactttgttaatgtcttagtacaagccaaggctgatttctgtgttgggactgaggcctggttagccggagaaccatctctgcagtgttgtgacaagaccctaatctcccctgccttgatcttaaagcttttgtctagatgtatccacagaccctcatgacggtgtccttctctctgggttgttccacagattctctgtgagccgcaccttctggtacactgaatctcccggggggccatccgcccgactgcccctgactccggcagcggggaccccccatggcagtgggcacctccccttgaaacctgccaagctggacgccacagccctgcacgacgacacctcggccagctccacgcccatctctgaggcttgcagccatgcggtcctcgcctgcggcccgggcatccctgaagagtactatgtgagcgaggctgtggaagatgctcccagctacagagagcaccgggatgcctgcaccatcaccggtatgctgaccttaccctgctggggatggggatggggcttcagccatcaagactgggagaggtatgcagccccaggagaaggcctgggagtgtatgcattttcatgttgccatggcagcctaactggctaaagcagtttgtagggaaggtgggcctattttggctcacagtttagggtgcagtctgtcatggttggggaaaagttagtgcaggattgtgagcttgctggtctcactgcatccacagttgtcaaggagacgaacgagttacgcagcctaggacccatgggatagtgcagcccacactcaaggttggttttcccacctgagttagcacggttgagaaacttcttggcagacatgtccagaggtttgtctcctaaatggttctcgagcctgtcagggtgacagcatgaaccatcacagggtggatgcagtcaccatctgagatcagggaccttccgttcagaacctgcttcattggtgtcattccgtggcttgggtcagcgtgtcacagaattgtcacagaggctgaagacagtagcactgggccccaggcagcatcatgggtgttcagtgtagtttgattctctcttgggttgtatttctccagactggcatgggcgtcatggcagtgacatgtagtgtcagttttagatgcaggaaaggctccacacgctatgttcacagaaagggttccaacgctgtgtgtgcctcagcactctgtcatattacactttgcccacacacatcaggagactgctgcacacatcaggacactgctgcacacatcaggacactgtgctgcacacatcaggacactgtgctgcacacatcaggacactgtgctgcacacatcaggagactgctgcacacatcaggacactttgctgcacacatcaggagactgctgcacacatcaggagactgctgcacacatcaggacactgctgcacacatcaggacactgtgctgcacacatcaggacactgctgcacacatcaggagactgctgcacacatcaggacactgtgctgcacacatcaggacactgctgcacacatcaggacactttgctgcacacatcaggacactttgcctgtgcacaatggcttctagcagcttctttttgttctgggttacccgtagagttacacacaggataccctgtgtattaagagttgcctgactgctgaggggcacagaaacagctgtagttccttggtgtgccagtgtgcttcgtccctgcctgggcctgtacacctgtctctcctgctccctctagtgtagcccctttgctgccctccctgccctgtgcccctgattccctcccctgtgcccctgatccctcgcccttgtctatattacttgagggcatggtgtcaaacacccacatatgacacaatccatctttcttctcagtgcaggaacatgttgggaactccttcttgggagaatcccagtgggccctgcaggcccatgttcttgtctctgcaggacagctcagttcactccagttcctgcaagagctgatgcttgactgtggaggggggaatggcttcactccattcagattctggaggttccttcttacagtgacctctaaaaatctctaataggacccctaggcctctcaggcccatctcctttatatgtcccctctgggcacatctcctttatatgtcccctctgggcacatgggcctccttgtggggactccttttgagtccttgaatatagtggcaagtgtcttctggctctgagccctgagtgagagggaatggtgtctgcttttgagctgaattggagcatcatccttgtcagagtcctgagtagggaggcatcatccaggaagctaagctgactggggagacagaggactatgaagaagttggctgcacacggatgcaggacgagcagggcacacagagggtgttaagcatcatccgctccatatggaggggacgagatgaggtgaggccagaacactccaaacacggagctgggatcccagccctgattctgccagtgaaatcttgggaacctcagcctgttcaaccagtttcctttctcaaatcgtgacaaccaagggcgagggaatggcagtgtagagtttggagcgtcgtccagtcccatgggatgcagaatcccaggcttttggttaggatgccccaggggacaccagagagacacgttcatgtccatgatgcccagcagccacagatacagctttgccaactcaggcaaagagctgggtattcaacccctgtaatccctccccgccaaagaaagtcctatcaggaggtcagtgcaacaaagacataaaatgcaaacgcgttctccggagaccttgaatatgcccgggagctctttgtggattctgagggctctgccaagctaagccctgggacgccacctggcactgtgcctccaccctcacttcccagggagtcctgagaagaacagtggctttctgttctacgctacagtttaggcaaaactagctgcccatcagaaaggcttctctccctgccttcccacccccacccgccccaccctagagaggtgtcgtgttgtgggtgcgccttttttttctctttggggtggtttcataagatgaggtgatagggctcctggttgccggagttacgtaatccactgtgcgtcccggggcagcgtggggatcttcagctctgccccaacaagcaagcttgggaaaactgctgaggaaggctcagagctgtggccaagcttgcatggaggaccgctctctctccaagtcctctttggagtttgtgtctgcccatggcattggcaattcagctcaggcagccctccagggcccaacctctgccaggactcagccacacactggctgggacagactcatgtggtgagtgttttcatgggaacgtctgtccgtccgtctgtccgctgtaagtttactttgtggtgtggccagaagggagggaagagcagagagggtcgtgccttcaaccttgctctgagctgggggtcgggttgctggttggttgaggaattaccgtgttgaatgatgggcagctgggatggaggggagctggacgctacttactctcacatctcctgtactgggttcaggggagaccagcaatagccaggtgtaagatgtaggtcagatttttgctggccttggtagagtctgcctctaaaacccctgtttccaaatcaatactatctgctgccccctgttccttctctccttcctcctcttcctcctccccttcttcccctcttcctcccccctcttcttcctctttcccctccttctcgtcctcttcttttttcagtactgaggactatgctttctagataagtgagcgacacctgagcccaccctccccatttttaaacctttttattttgtggtttttgctcactgccttgttcaggacgatcttgaactcgctctgtaggtcaggcaaggccttgaattttcgatacccctgcctccgcctcatttaatcagtcagcgcccagactggtgtgtaggtcagcaagggattttcacatgtgaagagcagaactactcagcacccctccccctcccccacattcttgtgtcttctttgcccaaagcttggccctgtgattgtggtccccacacccctgactagagctttatgtcggcctgctctggcttgttgcttgctgtgggcttctcagttcctctgagtggatcggattcaagtctgacgatgggatgacccatctagtttcctgtctgtactccaaagcctactgagttccacagtggcctcttcctgtcccctactaacaaattcaggcttgtagacttttaagtcttattcctaagctgatgactccaaacctgcagtcttaactgatgaaggtgcacggagcccctggatgttcaggaccaagttcttgatgcgatatctgttaatttctggggtttctcagtaatctggtcctgcacaaagcccagaggtgaacatgggtgtaagtgagcccctgtaaaccttggaaaacaagcaaggaattctcagggcatggagactcctggcatctgccctgcccgagggagaccatgcttgggttgggagacagctcagcccagcaagtgcctgccacacaagcaccagggcacgagttccagccctagacctgcatgttgaagccaggtgtgctggcgcatggttattttctcagccctagggaggcagacaggaacacccctgggcttgctggcccatatagataaatcggtgagccccaggccaatgagaggccctctctcaaacacaaggatggagagcaaatgagaaaagacacaggctgacttctggccatcatgggaacatatacatacatgcatgtttacagaaatacacatacatgaacacattaaagcaaaacaaccagaactccacaccccttctgcccccccccccccgnnnnnnnnnnnnnnnnnnnncccctctgcccccccccccccgccttcaccccaaagtcgccacacgaggaatccgtcccttatcacaaacacttaatcaccaaatggggcatcttagcctcctcaggcttaaataaaacatgaggcccttcttgaacatttcattcatttagcttaaagtatggtttagtaattctaggaatgtatttttaatacttccctttgacaagttataatctaagtgatatttactggaccatgaaggaaacaggaaggagtggacagtgggttagtggggcacagtgagaagctgcagcttagactaaatctagggaattgctaggattttcaaagtcctacattaggatcagttcctgctggggctggtgagatggctcagtgggtaagagcacccgactgctcttccgaaggtccagagttcaaatcccagcaaccacatggtggttcacaaccatctgtaacaagatctggcgccctcttctggagtggctgaagacagctacagtgtactaacatataataaataaataaatctttaaaaaaaaaaaaaaaaaaaaaaggatcagttcctgccccttccctctggatctctctggcctaacagtggagatcctgcaggtagacgattttatatatatattttgcatttgtcagaggacatgtgggagtcagttctcttcccctgtgtgggtcccagggattgaactcaggccgtcaggcttggccgcagacacctttgttctctgagtgcctctagccgacccgtaaatcagagtcttgacctataactgtgactgtagttcccaggtgcttggtgtagtttttatcttcctcctggtttgtttgtttgcttgtttgctttcctcagaagcaggctcttaatgtagtcggtggtggctctcattagcacgtctcttgttacagccttcacccaccccaagccactttggaggcaagcaagcaagcaataaattataatggaggagcatttcattgagagccaggcctggccttcagccctggcacctggttctccctactcagcaggggtgcacccgggagcgaaggaggggaggtgcagggtacaccaggccacaggagcaagattcaggacaagactaggtagacactcagtgtttctgtcggcaccccaaaagccatgagacacacacccaggggacccgtgggcaactgtgatgctgtgttcctgatgatgggtgttctaaggcaagggtcaccaaggccttctcagaagctcacgatcatcacgcagtatggcaacctttggccatgctttccattctatagatggaaaaattgaggctgagggaggttaagtgaagatatcgattcctgcggagcaggcttcagtctgggaggtctgtctatgggtttgctttttatccaccatccgagctttctgcaccgagacccacaggaaaagtcatgttgcgtagtgacttatgcatcccaggaccaccctcgccagtccctggcacttcctgggacctgttctgtcctaggtaaggagcgagagccgggattcaccaggctgttcctcacttccttgtggctgaaaacattcggtctttctgctgcattcttgcctgtcttcacagaaatgtacacccactgcttccgctagagccaatcccactttctgaagctctccgtgaggcgcctcacgtaaaaaagtgtgcagcagaaaaagtggagtgagttcctactgccgcagagtgacccgttagtccagtggtcctcaacctgtgggtctccacccctttggcaaccctctatctccaaaaaatgtttacactacgattcataacaatagcaaagttgtagttatgaagtagcaatgaaaataattttgtgggtggaaggtcatgacaacgggaggaactgtgttaaaggagcagcatcaggaaggctgagaacccctgctttagctctcctctccgcaagatgtctcagtgcacactctccttgtaatcatctgtgttactttgtagcctgtgtcagtaagttacttgttgtctccctagccaccaactacgtcattaattccctctccatagactgctgtgtgggctgctaagctttgcagatctgttctccaggattgggaagatctgtgcgtccacccagcaatgtctctaatgtctgagagggattgcctggagtcggacctgagttttggtggactttgatggaggtgttgtatgaacatgtattgttcacattattatcagttctgcctgtagctcacacagtgggttgcttccgttttttcatgaaatacctttaaagtccccttcctttctttacctcgtgtaagactgctgaagggattaagcaagggcatacataaggcgcagaatccttagtaaggcttagtatgcagtcagcgctcacttagcttctttatcgttcctgcctcatgattaaccagttcactctgtcgcctgctacagccttttgtctaatttgtctgcctgcctcttgtgtttctgtcatttgtctgcctgtccatttgtctgactggcttggagaaaaaccctggtggctgctgctggtctggagggaagccgagggaggtagagggaaggaaggggcctggctggcagagcagttaagacaggtagccctgcagccagcctccatttacagaccctttctcagttcctgtcccccatggtgacaccagccccagatccctcaaccaactgctttgaattctcacttgcagatgtgtctggcctttgtccttcgtcagcacacctgtgacactgagaaatgtgttaacccccacccaacagctcggtccgtttcacttgctgagctacactgctctttccagaggctgccgctcttcctatgagccctgctgggagcagctgcgctggcggcggttcccaaagaggctgggcggggccggggcggggctgggcccggggcctgggcggggccggggcggggctggacagaagcttcctgagctgttctgggagcaggatttccccagagcggctccctcccttcccttccccctctcccttctgttctccttggcgtccatcgggtaaactctggcaaactcttctgggcagccccgccttttaaaggagtatatggactgatctttcttcacagtgatttttaagggttctgtgagctctttatctgatgtatgcgtggacaccggctgactgtccttctgggttctgggtccgtcctgcattatctcagctcctgctggggcaggcgtagtctgcgttcccaagggaggggctgcacagctttgtgatgagcttggatctagagcttaaggctggctagtctggactgttcatagtggtggctgtggccctcccatccgccctaggccggtgtctacttaccagcctgttccccatctctaaagctgtcatgatggtgacatccttggggttcccttggcatctgttaagtgcctgtcactgtgctgatgtgtaaagttgtgatgtgtcctgggatcnnnnnnnnnnnnnnnnnnnnnnnnnnnnnnnnnnnnnnnnnnnnnnnnnnnnnnnnnnnnnnnnnnnnnnnnnnnnnnnnnnnnnnnnnnnnnnnnnnnnnnnnnnnnnnnnnnnnnnnnnnnnnnnnnnnnnnnnnnnnnnnnnnnnnnnnnnnnnnnnnnnnnnnnnnnnnnnnnnnnnnnnnnnnnnnnnnnnnnnnnnnnnnnnnnnnnnnnnnnnnnnnnnnnnnnnnnnnnnnnnnnnnnnnnnnnnnnnnnnnnnnnnnnnnnnnnnnnnnnnnnnnnnnnnnnnnnnnnnnnnnnnnnnnnnnnnnnnnnnnnnnnnnnnnnnnnnnnnnnnnnnnnnnnnnnnnnnnnnnnnnnnnnnnnnnnnctttagaaaaatgagtgcaggccacagcatcccaggactcagccccattttcaaggaagtctggggacacttgagttcattcactgagaactgctctcagttctgtttgttgttgttgttactattattattgttgttgttattattgtcaatttgacacaaactggagtcatgtggggagaagagttgagactccatcagattttcctgtggacaactctgtgggcatttgcatgattaatgattgcagagggagggcctagcccatgactgtggtgtcgcccctggacaggtgattctggattgtgtaagaaagcaaactgtgggtttatctgctcttctagaggatgtgggttcaactccaagcaccacacatggcagcgaacagtggtctcaaactccagttctagggtatctgacacccacttctgtcctctgtgggcgtagaaccctacacataaactaaaaacagaagagaaaagaaagcaatctgaacaagccgtggccagcgagccaggagcagtgccccccccgcagcctctgtttcatctcccgcctccaggttcccgctgtcagttccctttgtgatggccagtgccgcgcctgcaccatgcctgcaccatggactgaagccatgcaaagcctcccctcctgcaagccgcctttggtcagagttctatcacagcagctggggaaacaaattaaaaccggttttccacagacttttggttttcgcccagtgagagctctgcggataccttagggtgaattcgaccccaggacccattgcaaactgaggctgagcaggctgtctgacccttggtctggatgtggaatcctgggagaaacagaggggaggctggagacaagggcatgaaggtccagatttcaggactggtcattgtgtggctggcagaggccatgtgtgattcccactgcagctgaggagaaccaggaactgggaggtagggagtgtgtggtggccactgcctgcacgagtggctggacttggtagaacacaccacctgtacttgtgcataggtagaggaattggacggggatgggtagtcatggggagtctgggatctgggtctatgagatggtttgagtctctagcaagtaagaccttcttcagtgggccagtggacctgagatgcccgaggaatgcagatcctaagggagccacccagacccacaccctaactctcacctccaggctcagtcccagctggacggacccaggtgtttctataaaagcccaagacagactaagctcccagagggagggaggtaggctttatttctaaggctctttggagttctggggaaggagctcagggctttgtgcacttaaagtgagccacctcagtccagggtccattctaaggacaaggacaggccccatgggtaggacccttcctgcaacccctcccaggaacatgagcctgaaaggcagctaatgccagggctgttcccccttgtgtgcatctgttctggtttgaatctcacggctcagcgcgactttaacagctgttagcttataaactgaggacacaggccctccaagggatggctgaggaggtttttattgtggatatgagggagagtagagctgtaggcatctggaagagtctagaacaggggagaaagtagtgaacatggccagcagattggacttgggcatgggagtgggtgtggggctggagggaggaagagaggatcaagaagacagaaggccaaagaggaagagaaacaggagaaccaagagcgcaatggcctaatgacaagctgtggaaggagggcacggggcagagtgagatctgagaggagcctgacagcaggcagttttttttttttttgctcttcggtgttcgtgcacgtagaagaacaagagcatgcatgccatgtagcagtcttggaagtttctgggctcatgtccttcctaggcctgtgattggcaggaggacccgtgaggctgggagtgtggtgttgtaccaccacctagtggacatatagagcactacagcagctgccctattcccccacaccctgtgtttccatctcccagaggggtctgttattgtagctgtgtagattgtgggaaaccttctttattcacctcttcttggctttgctccctggccattctgagcactggagactatcctggaaattggccttgtagtggagggtgtgaccagagtcaagttaatctcatgttccttgcctgcgttccctgggacagaccttatctattggtgctgcactctgtttgcggtgctggggattgagcccagggcttccagcatgttaggctgcactgccaactgagctatgtcctgtccctgccctgcccaagctttctgacatgcttggagccatgccacgggtatcaggtctgaatgattctgcacagaacgtacgtgatttgcaaatggtaaacttgaccttaagccccacattatccctgtgaagcccaagaagaggctggggtcagcaaagtgactcacaaatgcttgtcctaatttgttctgggctagggaaacatcagttcacatctagtcacttaacagctataaggaaaagatgaagtttgtctgttttggacaacagcttcacctgataccactaatttttctctgaattaaagaacttgagggccgggagatgcctgagcaaggatgaagacctggaatcacatttaaaaaaaaaatccaggggtgttattctctgcctgtaatcctagcacttaggacagagacaagcagacctccagggattgctggcagccagctgagcctaacctgtgggagccaagaaaaggggagagactctctcagaaaacaaggggaacaaacgagaaagacacccaaggtgggacctctagcctccatagccgtgtgcacacatgtgcacgcgtatgcacacacacagcccctatagccatgtgcacacatgtacatgcgcatgcgtgcacacacacacacacacacacacacacacactcacatacatgtgcacacacacacacacacacacacacacacacacacacgctcagaaagaggctttgccgaaagagctggtaagaccctgattccttagggccccaggctcctcctctcctttggttttaccattttcactatggccaccacctttaatgttaccgcattcctaggaaggtccaaaagctcaggccatccctgaccagctagtctgtaccgatggaccgtcacttctgtggtggtgtccgaatgtaagcctcatggtcatgcttcgctgtggaggtggaaatgggtggctgagaagttcttgtgccaggctccagggcttttagacaatgatgtccatcaggccacctccaccaggagtcaaatcgtgacgtgaactttctatagcagggtttcttcatctttcacacctgtgcaagaatgtaatggtgcttgcaaagcatgatgggtaaaaggtagaggtcatttgtagctggaggccatgctggactctggccatgctggactctggctggcaccttgtattctgggcatagcgtgggagagttctggaatctggaagcacatattttatgaggcgaaagacagccaagggatgcggcctctgtaatctgaggtgccagaaaggacctagccttcagaagctgaggcacagagcacaacagaccctttgtgtctgaggtgactgtggggttcctggatggagacagtctcagaatgtccccagagagactttaactgtgtgtaagggactctcaaagacccagagactctgggaagttggacacaagttaaaataaagctttagggccatggaggcaggagtagcacgggtagtagttacttatgacagtgccctctggggccagtctcttttaggaaaagcagagtctgttgtctcccgctgtgtgacctttctctacttacttaacctctctgtgtgctggtgtcaccagggacattaagaatcttgagccgggtggttaatcccagcactcgggaggcagaggcagcggatttctgagttcgaggccagcctggtccacaaaatgagttccaggacagccagggctacacagagaaaccctgcctcgaaaaaaccaaaaaagtatcttgactcttagggctggagagatggcttagtggctggctgcccttctagaggtcctggtttcagtttccagcactcacatggtagctcacagccatggtcccaggggacctgactccctttcctggcttccatggggtaccaggnnnnnnnnnnnnnnnnnnnnnnnnnnnnnnnnnnnnnnnnnnnnnnnnnnnnnnnnnnnnnnnnnnnnnnnnnnnnnnnnnnnnnnnnnnnnnnnnnnnnnnnnnnnnnnnnnnnnnnnnnnnnnnnnnnnnnnnnnnnnnnnnnnnnnnnnnnnnnnnnnnnnnnnnnnnnnnnnnnnnnnnnnnnnnnnnnnnnnnnnnnnnnnnnnnnnnnnnnnnnnnnnnnnnnnnnnnnnnnnnnnnnnnnnnnnnnnnnnnnnnnnnnnnnnngcaggggtgatcagcaagcagagcccgccgttccatccccagcaacacagacaggcagattgatcgatgtgagtgtgcagaattaaactttaacacagtgatgtttacctgttcctgaaaattgtgtgcattctacaaatccgacactcagatttataggagttatatgacacacaaccagaagacacacagattggcaggcagccatcctggcctggctggagccacagaggcacaggaagagcaggtacatgggaaggtggatctcccagagccagtggacaaaccaagacaggcaactctcttcaagcagagccttgaagcaaacggcttcatttaaacttctatgaggcaggaggtagggtagcagatgcctcaacaggcagagactggagtctttgaagtcctaggccacctggcatacatgggaccctgtgtcaaaaccaaaccaaacacgaacaatacagagactgggtgtgggggtacacattgataatcttagctatttaaaaggtggaggtggaactatcaagaattcaaagtcatccttggatgcatagctggctccaggttggttctagctggcgccagcaggtttgtcacgtctgggtgacagtgctgaagctggtgccttctgtagtgtgtactttttgctacaagctataagctccaggcggaccacactaccagccccgcccatgttcccttggatccttggatgaaggacacacactttcaatctgccctcttgactcagttgctgggcatttctgatctccctcggctagcgtgcccttcccaatactctttcctcagcacctttcaatctgccctcagcttcagctgctcagttacctttagtcccagctcaacaccctaaccttctgcttggagaagcagcctatggctgctccacccaagatctcacatggctggtcaccttttctccctccgaagcatggtgaaaacccttcctcctctgcatctcctcagctctcctacagggacccggaagtcccacctctttccttctgcccagtaattggcccctggcatctttactgatagctcaagaaccaattgaggaacaggaccttagcatcagacccactccctacaccttccacagtgggagggatgctgggatgagtctctgaaggatctagaactggaagggaggactcggggtcctttgcttcatgattttctgtctcatgaaagagagtgagggtgggaagggtctgggtgggcacaaatgcagaattctaaatgtcaactgtgagcaaagcccttgttctacattactagcattgccaggattacgtatagataagggttgatagtggggtaggtgacaagcagacaggtgatagatatacgttgactgactagtagatgacagacagacagataataaatatagatagacgatgaacaaatagacaatggatagatagagggatggatggacagataaaaaggttggcaactcaaaggatgatggcacaggcctttaattccagcccccaggaggcagaggcagaggcagaggcagaggcagaggcagaggcagaggcagaggcagaggcagaggcagaggcagaggcagaggcagaggcagaggcacgagcgccaggaggatctctgtgagttcaaggaacttgagctacatatcaaactccaacccatccagggtaagaccttgtctcaaaacaaacaaacatggacacagaccagctgacagctttgttgggagatgtgctctgtcctagcctgtcctgggaatcgttgctgcagactgttggtagtcttgtctgggcagcagcgtgagagtcctttctccctcaggcctcggccttaggactctgggctctgtgggtggtcttgtccttgactgtgtggtgtgctttctgtcaggtgatttcacactgcaacccagcccagaaagtcaagcaggaggaccggacacgttgcacagtcttacaaaatgtcttgtgcttttccaaaccacttagcaaagggcttccacgtttctgagcctgtttctttgtttcatgaggcttgcctgacctaagtgtccctggcctccaaggcacctcccctcagtgagcattcttctcagtgagacagggtggtacacttactgtgtagaacttaacggccttctgcctcggtttcccaagagcgggagctccagatggtcaccaccatatccagctaccaaagccattaaaaattattacagtgcttcccaaggccactcctaactctacataatcaaaccaaaacacatgaaaggaaatgtcatcaggtttttataagatcctttaggactttagtgtagagtaatttttattgagtggtgtaatggatttaatgtgaaagcctacttccaaagaaatacaacacctgggcttggcctgaagctcacatggttgcttacctagcatgcagcaatcaatgtcaagtgtaaaccaggtgctgtggcccgtaccaacggttatcccagcatgtgggaggtagaggcaggagtccatggtcagctttggctccattgggagttcaaggctagtctgggctacgggagacactgtcagaaataaaggaagaaggaaaggagagacagagagagagagagagagagagagaatgtcaaaagtcccgttgtttataataagcccttttctcttcggctatggagttccagtctcctccccagtccctcggccttcataaggtctcccgagtcatcttctgcctgatacactcagaggtgagcaccctcacttcttttaagaaagaattcataagcagaggtgagttctgtgagccacttaggcagattaacttaacccacagagtggactgtgggaacccagatgcatagacccttggccagaaagaaatacgtataaatgtatgcatatttattgtatatgtacacatgtgcacacgtgtgcctggcctgtgagcagagatcaaaggatgacgtgtgtgtgtgtgtgtgtgtgtgtgtgtggcttctccttctacagtgtgggttcaggggttaaattcaggataccaggcttggcagcaagtgcctttacctcacttcttgcctggcctgtgaccagatctccctcctgtacctgttgttgcacagtagaggacacataacctgtttcatgagggattctgccccccccccccccccccagagcaaaggttgaggaatcctagcagactggctctgccagtctccactgatctccagacccgtccatgtttccacacggctggccacgctttttttttttttttttttttttgatgttttctgcacttcctgaggacatggagttcaaggaaggtaacacctcagagaaggcgtgagaccagaaccaagcttgccctgtacgtagcctcaaccgtgtctgtcgtaagcggaagggagttcctgtgaatcctgtgagccatttaggcagattaattgaatctaccgagtggactgtgggaacctagatgcatagaccctcggtcaaaagcacaggtaggattctgaggcttgctgctgaactcaaggggtgcattttggggatcaagcctgtgttgtgtgggatctgacactgtccctaggcagtggagacttgaactaaatccagggcccccagtgatactggctgaggcttgggttgtagtgtggggagagaccctgggccggaaggggttcctgtgagccagtgggggggaggggtgtgccagagagtaggttttttttctgtatcagcgggatcacctttagttttgattttagattgtctcgtaattggaccgagctagggtcactcgacagaaccagacccaaacagcctgagttcatgtttaccatgagcccacctgttctgaatgtagacgtcagtggaatagacctttagtgtattacagactcgtgtgctgtcaaagcctttgtcatttcccacttgtcttgccagtgtatactctcaaatgcctaacattatcttcctcttgttgtgtgtatctgtgtgcatgcgtatctctctgtgtgtggtgcattgtgtatttgtattcatgttggcatgtataggcacacatgtgtgggggtgcacttgcacacgtgtacacactcacgtagaagcccaaggctgatgtggggaatcatcctctattgatctttcaccttaattattgagataggtctctgaatcaaaccaagagctcactgatgtggctagtcttactagtcagcttgccttgggatctcctgtcttctttttgcccctgagccaggggctttccccatcccttgtttgccattggattctagacattgtatttgtatacgtttgtggttcattatcgtcttaaacaacaacacttttcacaagttgtgttaaaatacacataacagttgtcaaagaacacatttaaagcacatcgttctggactgttgagcacctgagcaccgctcctttacatgggcagttctgcggtttgaacttagcttcatgcatgctaggcaagctctctaccagtgaacttttgtaccgctagtgcatttacatactgcacactcaccactgcctggctctggacattttcacccaaaggaagcgatctctattaatagtcgatcttccttagcccctggcagtgcccagtcttcctttccgtggtgggtggacagtctctaggcgctttgaaggaaaaaaaaaaaagccatgccgcttgtggtctctgtggctggcttctttcacatcctctgatttcaggggacattcacgttggagtgcctgtcaacactgcattctgtctttatggctgactactgttccattgtccgggtgtactgtattcatttatcagttcttaagtctggcgacatctgggcttttttgccttttagtcctgtgaatagctcgctgcgagtatgttcgtatggttccctcagaacaacttttttcagcctgggagccagcagtagagattgctgtggcatgtggcagctctcatttactgaggagctattgaactgtttctcagggccacacctgtgctaggcagagggcagcattaacgatgccagcggagcttcaggctctggctaacctgaggggagtggctttcttcccagctgccttttctggtggtggtcactgtctcacccctctgagtgttcttaacaacgtctcctccacgtaggtttaacattttggttgttgtaaaagccacacaccacccattacctagggacaggattgcgtccagggagatatatcgatagccgattgcatcgatgtgtgggcattcctgggcgtttttgcccacagtaaggcagccacgacgtcaccagcatgagaccatctgctttgctatgggcattttggaggcgtctcggcaggtccctcctccttcgctttgccccgctttttgctgcccgctctgttgcacaacaagccagcatgcccacttgaaccacgccacattcagttgctcaaggttgccctttagcctcacactggaaaccctgtttctgtaaccgagtgggtggactggctgcctcagcacagctgcttgtcaggggtatgtatcttaggagcctgtgtgagggcttgtatgtgtgtgtgcatgtgtgtgtcggggtggtgggcatatccgtacccctgaactggttgctttttggataccgagttcttcaggtgcttaaggcttcaaccattctagagaatctccagcgttgtttgtttctctgaagcttagctctgttggcttttgctctccagtttcctacatgcttgtctgcctgccttgtgctcccggagaccctctttggctgctgagagtatgggggacctcagacacagagccctaccttctgtcttgtgcctcctcagcccaaagttcacccagtaccctgaggccttccagtctattggcttagcccataacacgccctcccaagtcttccatcctctgggtggtgcttagagccagtacagtgtgttctggctgaggccagcagagccttgcagaggatctgcaaggtcttggttaccagggtctagaagcttttcagacagcgtaggagccatgcccaacgcgcatgtgccagtttccggccggccatgctcaatgcgcatgcttggctctgtggcgccacagcctctctgaccctgcttgcctgcatccactgacgtgtttgaaacagcagatggttctgtgagtctcctgtaatctgtggagttaaagcatctgtgctagagaagattaagtgccagtggcttcagcctgcaacacagagaacaggaagatggtgtgccccagcactgtgctccgtagtgcaaacccttcacaacaggcaaaaataagtgattgtgacagcgttccccagagaagtttaggctagttcccaaccatcctggtcccgagggaagagtgttctaagtcgtctgtcagctagctgtagatggccaagtgtctcctgtgctgcatggcatatgagtgtctttgggtctgtacccttcaatcctcataatgtccaggaagttgtaatggggtccaggtctctacagagaaggtgaggagccctgcgcagctttgacacagcgtgaccactcacagttgctgccaagggtgacaggacagagagaggattgctccctccaatcagctcctcttgggagccaggattagactggggccagggtggggatacttggtggctgagcagtgggttggagagggactaggaggaaaggtgaagatggggggagctggcagtttggccctgtttgatgagtggctctcgtatgggcccttgcttgtctctgttaatgtagccacaatgtactcccaaggcctgcagtgacaggcagggtgggaaatcccagcatacagacttgtttcatgtggcctttgtctacttaaaaacttctgaattagtctagcatgtagaaatcaagggatttgagggactagcaagatggctcagcgggaaaaggcacctgccaccaagcaggatgacatgcgtttggtcaccatgatcaatgtggtgggagagaactgatttctacacaggtgcaccgtggcatctaggtccccaaataaataaataaatagatagatagataagtaaagttagtaaatgtgattttaaacgttaaagaaatcaggggattttgtgtaaccattcagatcctgagtcttagcgaagtcagcattggaggacagagaaggtgggtgctgccccagaagaggctccgcaagcctgtggccctccctgtatcttttcagagagcttgctggtgggcagagagtgccttcctcctgctactgtcccacacacagaggaactgagtccagagagataacgatgaggcttgtgtgggagttacaaggcgcagcgtgggcaggacggggctggggcccctttctccagactgttttgcccacttctacaaagtcacatgggccattttcacgcagccaaatagtgcgctttgagcatgctcactctgtactcccctcccctccctctctgagccctcctacctctttccaccagcttcgttcccctacagtctagggcctagacagttttccctttcacatcacccatgcctccctggttttatgtatctacaaaatctaggagctacaaatggaagagaacgcatggcgtttgcctctttgagaccaccttcatttgcttagtacagtagcctccagatgcatctggtgacgtgacttcctccgtaaggctgaaagcgttccactgtgtttatatagatcacgctttccttctcccttgctctgaggccggacacccgggctggttccatctctcaggtgcaaagatctcagggatgcgctgacttgggagtcttgggagaagctggtcacatggttagtttggtttgggtattcttgaagccttgctatgcactgtctgtccagaaggtggcagtgtggcgccggcttcctctccctggttctccaaagccgccttctgactccctctgttctttccttttgccttcttgtttcgctctcttttatcctttccttccctgatggcttccccgtgtctccagatctgcagagtggtcaggggtgtttgtgtcctctgtcccctgacagttgtgcagttagtgctctgttctctgggaccagaaccctgggcttctgcgtggtcctgaagcagcaggcccagaatcctgggggtgcatcccttctccatctggcgacagccacctcagagcagttatgtaccctgcggaagaggagacctcctcccagggagcctgacttctgagattccctgagttttaaatttgaacactagagtcatcgtctctgctgtaaggaagaaaacctggtagattaaaatacaaatcagcacagaacaaattctcaggtggaggggcctcctcaaagcatccagtctgagtctgtgggaatggagagagccacctctatattccgagatccctggggctccctgtattgtcccctccctcccaggcagctcccgagaggtgccttcatcttagaagggggtcattccagacctcagggcttgggcagttcctaggggatcctgggagtagacttccatggcaggcgttatattggcctctgcctgggatgtggggggacttctgctgtcctgtgacacttttctgtactgctagacagagagctagggccatgaaatgaccccgtcatgggatggcggcacctcctgcatgctgaagctggcggcagctcttcctggaggatgaagaggtctgcgggctgggtttgaggctgggctgggactcttgagccctttctcctgagtggctctcggttagtggggaggagatacggagaaagccttgcctggcgctgttgtgtaattgtgtatgtgccgaggcctgtgagaagcctgggggaattggtcaggcaaggttcacaaactcaagctgacatttgagtgacattttagggtgcagcggtatgggtagcgaatattctagaggtgtctaaaatagctgattaaaaaaaaaaagatttctgtgtgtgttgggggtggggagctgtggagaatggcaggaggtttgtgtgtcctgatgtaagggaagcgagagaaaacagcaggggccgggctgggaaacgtggttcagctgtgggcttggctgcttcataagaggcagggctgtttgcgaatcatggctcccataaggcaggtgttcatgtgtctacatggaaggtgccatgtgtgttctctttagtctacatggaaggcatcatgtgtgtgctctttggtctacatggaagtcaccatgtgtgtgctctttttagcttgtccaggcacccagggctgatacagcccttggcattgcctgtgtgactaaagatggctagcacctgcaagctgggcaggtgacaagggttagggttagggttagagccttgttaagaacaaacctcccttcgcccatatgtggaggcgtccacccgtctcctggtgtgatgtcatgggacaccctaagttccacacacaggcttccagagatggacagtggtagcagagggatggccagttagtcactgagggctcctcagactaaacctgcacctgcttagctgcctggccttgactaacaagatcacccatgctccttcctcacctgtgaagctgagcaaagaaaacctcgtccttcgtttccagctgggacagtccgcaagcacctgtctgtgggtctccagtgttggcaacatttctacaggttctttcagtgtgtgagctctctcttcattcgtatataggtgcatgagtgtatgaaaacgtgtaccgaggatagagaacaaccctggatgtcgcttacctcggacactgtccattttgttcgttgaggcagggtccctagcctggcaattcccaggaggactatgccagctggccatcgagcctccgggatccacctatctctgcctccccagggctgggattacaagtgtgtatcaccacgtccagcctttttatgtgttttctgttgatggaactcgggtatcctcatgcatgcctggcaagcactttactgactgggtttctccccagcctcagtcccacgagtcgtcatagttctttttttgtttttttgttttgttttgttttttcaagacagtgtttctctgtgtagccctggctgtcctggaactcactctgtagaccaggctggcctcgaactcagaaatctgccagcctctgcctcccaagtgctgggattaaaggcgtgcgctaccaggcccagcctcgtcatggttctttatgccacttttacccagcctcagacttccatgtgtcttctcagcccagcgtgctcatgttcattcttacaggagttcccagagcctttgtccctgaggtcaaggaacgagctccttggctgcctgtcctatgtcctaactttctgtgctgtgaaagcaactgcaacattgcttatgtatagatggttggccgcattatgaaaagttcaaatactctgatgtttgagaatgcattttggtccagtcttggaagaacaggtcgagtcccagtggctgagcaagtgacagtatggtcacaagtgacatgttattcttagaagggatttccacactccacctaccctgggctctgttctcttccctactgtcaaacaccacagagacaccagagaatggcagcctgttgtgtgggtgttcctgtgggaatgtgttggtcccctgcccactctcctgcagacaggctgccgctgcctttggggagtgggggtggggcagctgtacagagctggtttggtcagatctctatttagccaaaagatgccactgactggcagcagctgtcttgagccccagtcctcttcctcaggtttctcaggtagtggccatgcagtagctgagggttctacagaggtggggactggctgctcaccttgtagtaggcctgcagtggagggtgtttccttggggactgagtgggaagagaaggtccttgtcttggggacattgagccatggctctctgcgggcagtcacggcttctctcatagctctctgtgggcagttacggcttctgtcatagctctctgtgggtggtcacggcttctgtcttgcctaggctttgctagctgagatactgaatatgcctgccctgatccttcccatcttaggcagagaagcccctatgctcagatgcacacattgccccttctggggactgaactgtggccctaaagcaccttgaaatccccagaggccacaccttacattcaatcatttgccctcttcttggcactctgagagcccacgctggcttcctgcctgggaacgttccgcagtgagactttacaaactgagtgtggtgggccagtgcaggctcctgggaatcttgggatgggtgtggatcgctgggtttccgcgcagagagtgacagtttacagaggaacaggatgcgggttagcctgacctggtcgtgcaggcacctgcatccctaccgtcccacctgggttaccacctcctgccttcttgcctctgctcatccagggagaggaaggggggaaccccccaccccccaccccccagcatctgcatttccccacgtggtccccctgccacattccacatttcagagtgaaccggcctcatccttgccttcatctgtgttcccagtttcctcaaccatctgccctgctaactttctgattgtttttttcctagccgaggaccaattcttagcaccaaaggcagaatccatcatcctccctctctctctctctctctctctctctctctctctctctctctctctctctctctttttccccgagacagggtttctctgtatagccctggctatcctggaactcactttgtagatcaggctggcctagaactcagaaatccgccagtctctgcctcccgagtgctgggattaaaggcgtgcgccaccacgcccagctccatcatcttctcttatccagctaggcccacatggagcgtagtcggcttcctggttgaggagactcaagccactcccacagtggtttactgctgtaggctccttgctgaagggggctgagctcatggtgacgtcagaaacccgtcatgttgatttaatcatagcctgcagggcactgtggggtgtccccatcctgggtgtcatcctgccatgcttcagtttaactaaataaaaagcctgcttgggtggattgtgtgggagtggttcaccgtcaccttggctgcttagaatcaccatggaagcacacctccaggtgttctgcagtatcctgtggtttccagagaggtttcactgaagcggcaagaccagtattggacgtggggagcaccgttttcttcctggactccggagctgaataaaacgcagaaatcgagccctgcaccagggctcctttagctctgcttcctgactgggggtgcggtgccgccggccattctgtgttcttgccagtacaccttccctaccacgatggactgtgtgccttcaaacggtgaaccaaagtgagccctcctctgtaagctgactctgatcaggtttggtcacagcggcaggagaagcacccaccacagcatctcaggctacgagcacagcctggacccagagctgtggagtccaggggtgaatcaaggacatctgtgtgtgaaagattgctatctcagggtcagatgggtcatgtgctgcagtgctcagaagacaggagttctgacagggcactgtgggtatgagggggacagagagagtaactctgcttgggggtgtggtcagggaaggggctatgttccagctgcggctgggaggatggccctgcttctgcatctgctgactctacacaggaacaagcactgctgtggtgaggtcaggactgtgaaacactgctgtgtgatggttgtgctcgcaggcatctactatgcctctggtattcaggatgtgggtgggaaggtgggtggtggatggatgagtggatgggtgggtgggtgggagagtggatggctggatgatggatggatggatggatgagtgggtgggtggatgggtggtagagcggatggctggctggctggatgagtggaatgaaggttggaaggaataatggatggagggacaggtggaagaatggatggatggaatggaggatggaaggaagaaataatggatggatgaaaggaaggatggatagatggctgtatggatagatggatggctggatggatagatggctggctggctggctggatggatggaaggaaggatggatggatgaaggataatgaatggatggaaaggtagaagggaggaaagagatggatgaaaagaagggtagatggatggaatgatggatagaaggaaggaaggaaggatggatcaataaattaaatgtagcctagattctaggggaggggatagcttaagcaattgaatgccttggttgaatggtaaccgggtcagctccagagtgactgagtgaagagagggtgaaagacttggaagatgaaggtttgagaagccaatttccctccctagatagtaggcactcaacaggaggcgctactctggggaggtctttgcagtcagcacgcagagttctaagcttaaaatactagtctctgtggactcataatagttttcatgtttatggggtacagtgtcacagttcagtacatgtatatactgtatagtgacccagtcacgccgctggattatccatcactttaaacatgtgccatttatctcatggtgttgggatccttcaaaaccctcagtactggttatttggaagtgtttacttaatggctatcagtcacagtggctgtatgtcctggctgggtttatgttaatttgatacagctaaaatcatctgagaggatgattaacctcaattaacgaaatgcctccataggattgggctgtagacaggcctgtagagtgttttctcaattagtgattatttgggaacgggttcattgtgggtggggccagccctgggctggtggtcctgggttctataagaaagcaggctgaacaagcctggggaagcaagccagtaaacatcaccctccatggcctctgcaccagctcctgccttgcttgagttcctgcctcactgcttttgatgataaacggttacatggaactgtgaatgaaataaacactttcctcccagcttgcttttggttgtgacatttcatcacagcggtaggtaccctaatggagacaccatacttggctatacagtgttctaagatatatgtttggtacctacctgtgccactgtgcccatcagacagctcccacctcagaaattctatgttttgagagtaggattcaaattagtaaagacccctgatggatatgtccttgcctggattttgcatgctgcagacgggtgcagaaggggtaggcctcaagcttagctctcggaaagtgacagccatggtaggttctcactcagtcgtcttctccccagacgtgtgcaacagcaccaaccttccagaagttgagatcattagcctgctggaggaacagctgccccattacaagctaagagcggacaccatctatggttacgaccacgatgactggctgcatacgcccctcatctccccagatgccaacatcgacctcacaactgagcagatcgaagagacgctgaaatacttccgtaagtagctggcgccatctgtgggcacagccgtgcgatgccaagtcctgtgttgtgggcccgccatctgtggagcggcagccaagagggatgtgatcttgggggttagccatgttaggggtcttcttggtctggatgagtagtggggaccaagcattttcatttgaaacatgcagaataacttcaaattattctcatgtctcttcttttctggtttaaataatgacttgtatttattgtgtattttatatgtgtgtctgcctgcctgtaagtatgtgcatcctgttggttgtgagccactgtgtgggtgctgggaattgaacccacttctgtaagagcaactagtctcttaactgctgaactttctctccagccccatcatttcccttataaatccccattgagagtgaatctgtttgcatttaaaaaacaaagattgcaaggaaatctaggcagcttctgtcagtgtagacagcaaagcctgactgtggaagctggttaagctggaattccaggagccaaatccttgctgcagtatggagttatacctctaggtggcagagctgcttcctgtcgggtgagcttaagcttaggcttggaggcgactccaaggcagggagggcgatcgagagtgctgtgtgctgtgtgctgacgtgtactgctgacaggagaatgatttaaacattaatatttactgttgcttatgtttactcaaatgacagttgtttttcattccttcttcctttctccttctcttttattctttcaatgctaggatttgaacccagggtcttgtacatgttaggcgttaggcagctattctaacagtttgcaatggactcagtccttaaaaggatgcttcttaatttttttttttttggacagagtctcactaggtagcttggaattttctatgtagtctagactggcttcagattcatgctgatcctcctgcctcagcctcccaaatgctgagattacaggaggggtaccaccacaccaggcagtacatgttgctttatttttttccacagtaagactgagtccagaggctccaacatgctaggcaaatgctcttcccttgagtggccaccatccctggagttctgttctttagaaattcacacgttctgggtctggagagatggttgagcagttaagagagattgctgctttcctaggagagctgagttcagttcccagcatccacgctgggcagctcacatccatctgtaactccagtgttggggaatctgatgccaccttctggcacttatgggcactgcactcacgcacgtgcctaagaccagatgtacacatatatccatacttttaaaaaaccttaagacaaaattaatttactctctgtcaatacatatccatgtatttctcatttgcatattcatgtcattacagtatcccttttaaagatattcctgcttctctgacagtaacagaagaaggttagggttaggggttagtggttagggttagtggttagtggttagggttagtggttagtggttagggttagggttagtggttagggttagtggttagggttagtggttagggttagtggttagggttagtggttagggttagtggttagtggttagtggttagggttagggttagtggttagggttagggttagggtcactgagaaccagcttgtggtacattcttgaactttctgcagttagaaaccagttcactagcataaaccagtctttccaatttctgagatcatttataataaaacaaattgcagctataagctggtgctttagggtgtgtgcggggcaattctcaggttctctgtattagatatgagtaagaaggaattctgtttgacctgttgagtgtatcttccataggcttccctgatagcctgtgtcaataagaacgaaaatagaataatccaggcctagagtatctggcgtgcctcatagtggatcagaactccttggtgagtcagttttgtttagccagggtgtctgtaccagcgaggagtgagtgtgggattgtgcatggaaagccaagtcacttaccacgtaggtttcgtatttttctcttgtggatgtaagtccacagtatactttgaaacaatcagttgtaagaaagtctgtcatgcaacttgttcttctattggagcctcgctgttgtctctgccgtgggaggctcctggttccttctcacaagcatcgattggccatggacctgcacatgcgtagtgtaattggtgtggtggtcaccacagcatcagaccattttataggatggccacagaagtgactcgttgaatccctataaaacatctacagataggcaaggcccaccagtgcccagttcctaaggtctctttaacaggagactcaaacagagattcatcatttgttttcagttatacatgtaggaaaatgcaaaggaagccctgttagaatcacaggtgggtaccacagagtaaattacaagtggaggagctggaatgagcttaaggttgggtgcatccaagtcttcttgtgtattatttccttctgtggattctgtgcttagagctgggtggctctttattaatgtctgttaattggagctggagagatggctcagcagttacaacactgacttctcttgcagaggacctgagttcaggcctcagcagccacatcaggaggctcacaggtgctccacaggagtgatgtcctcttctggactctgggagcactgcactcacatgtgcatccacctcatacatacaaatacatagaatcttttaaaaagaaaaagaacttaactatctgctaattgaaattaaagatttaaagtgaagttctgtgacacaccccacccaaatggtcagtaaagagaatttaagagttttatgaatttagttatttcccttaacttccaacagagatgtaacattgtcttctgtgatcagactggaagactaggctggatgtcagctgcagggcatgcaactttgttaccagtggagagcagagatgcctgggtgctgcacacccacagcagtggctacacactgtaaaacctgcctctgcccatcactgggagcagatgctgggcgttgctacagcactgtgaaccttttttttttggaaagatcttcgttaagcagctcttacatcagcagatttggttttccttgggctttctgaactgcaaaacacagcattgctgtttgagggatagaagtgcaggtgatgtgtagagagcaacctaggggcctgctctgtgcctggtgtcctggattttttgtttgcttgtttatttgtttatgtctcaagacagggtttcactatgtaacactggctggcctagaactcaaagagatccatctgcctctgccttctgagtctggggattgaaggtgtgcaccactgtgcctggccctactacttatttatgtatcttgtgtgtgtgttatatatctgtgttcatatatgtatatgtatatgtatatatatatatatatatatatatatatatatagagaccagaggatggcattgtcttctatacatcaccaatgtatgtttgttggtgttttgttgttgtttctgagctagggtctcactatctatccctgactggcctcgaaagcagagcttcactggcctctaaagtgctagcattaaaggtgttctccaccatgctggctcaccttacattttaagacaggctctctcagtggacttggagatcaatgactcagcttgactggctggtcaggagcccccaggaaccggagttgggatcggaggggcacaccagcatacctggcttctttagtgtatgccagggatagatctccagatcttcatgtctgcacagcaggcaggtttccactgtgcttcatccctgccctggttgggttttgtctatgtgtttacatatctgtaacccgggagacacatgactcagtagagtgaatcaccagtgccaggccactgtgggtggctgagaagacattgtccactgcttcccttctaggtccactgtgggcattgtgtagggcggtgcccactgtggctggtggagttggggatacagggctccctaaggtgagaaaccagaaggggtaaaaccagggtaggtacatcctggccaccgtgtttgggggtaagaccccactgacactcccccccagtccccctcctgggtggacagccaggctctgcccctgaacctggccctcagttgcctggctgatgagagggaacacttccccatctgctttttttgagtcagacctccttctacatcaacctttccagagtcacttcattcattcagagaattcatttccatggctcacagagtatgtgctgcactacctgaaaccgcttcctgctctgtgacatccagctgcctcatgtggtctgacggtgacctgtgtgcagtagaccagtcatgtgacactcagcgcacaccaagcagcaaggtcaccatgtttgttcttgggtgaccatgctcctgttggtccttcttccccggccttttatggttgacaccaattgatccaagaagtaattctttgtgtcacacccagatctgctgaccaccacacctcagaggtcatctgggaaagagcaggccctgaagcaaacaggttttggaatgtcaccccagcctttgctttcggtgtgcagtaatccagccagccagtatgtgcaggatcaggcaggcatggcgttcctttcagcaccagagttcttgcctgagatttactaagaaggtggacacatctctattgtttagatcttcttcccatcctaacccaggactgtggcatgtgcaggctcgtgctgagggtagtaaggacagtgacctctcctctgggacatcattctttcctctgtgagggttcccaccccgacaccttgaccggactgccatgctctttcagtagggagtaccttggatcaggtcctgtcagcttcaactctcctgacagaggtacaggcagcctctggccctgtgttggctggttgtgggaacacacggtctgctgtgcccttccattccagcccctgcaccccccccccccccacacacacacacagctgatctcacatactgaggagcctcggtatcgagagagctcttactggggagggtaccaggatgctggttaagtatgaggagccttattcaaggtattcccgttgagagcttagtcaattgtgcagttaaactgtctgcagcattggtccctctctccttttcttgtcttnnnnnnnnnnnnnnnnnnnnnnnnnnnnnnnnnnnnnnnnnnnnnnnnnnnnnnnnnnnnnnnnnnnnnnnnnnnnnnnnnnnnnnnnnnnnnnnnnnnnnnnnnnnnnnnnnnnnnnnnnnnnnnnnnnnnnnnnnnnnnnnnnnnnnnnnnnnnnnnnnnnnnnnnnnnnnnnnnnnnnnnnnnnnnnnnnnnnnnnnnnnnnnnnnnnnnnnnnnnnnnnnnnnnnnnnnnnnnnnnnnnnnnnnnnnnnnnnnnnnnnnnnnnnnnnnnnnnnnnnnnnnnnnnnnnnnnnnnnnnnnnnnnnnnnnnnnnnnnnnnnnnnnnnnnnnnnnnnnnnnnnnnnnnnnnnnnnnnnnnnnnnnnnnnnnnnnnnnnnnnnnnnnnnnnnnnnnnnnnnnnnnnnnnnnnnnnnnnnnnnnnnnnnnnnnnnnnnnnnnnnnnnnnnnnnnnnnnnnnnnnnnnnnnnnnnnnnnnnnnnnnnnnnnnnnnnnnnnnnnnnnnnnnnnnnnnnnnnnnnnnnnnnnnnnnnnnnnnnnnnnnnnnnnnnnnnnnnnnnnnnnnnnnnnnnnnnnnnnnnnnnnnnnnnnnnnnnnnnnnnnnnnnnnnnnnnnnnnnnnnnnnnnnnnnnnnnnnnnnnnnnnnnnnnnnnnnnnnnnnnnnnnnnnnnnnnnnnnnnnnnnnnnnnnnnnnnnnnnnnnnnnnnnnnnnnnnnnnnnnnnnnnnnnnnnnnnnnnnnnnnnnnnnnnnnnnnnnnnnnnnnnnnnnnnnnnnnnnnnnnnnnnnnnnnnnnnnnnnnnnnnnnnnnnnnnnnnnnnnnnnnnnnnnnnnnnnnnnnnnnnnnnnnnnnnnnnnnnnnnnnnnnnnnnnnnnnnnnnnnnnnnnnnnnnnnnnnnnnnnnnnnnnnnnnnnnnnnnnnnnnnnnnnnnnnnnnnnnnnnnnnnnnnnnnnnnnnnnnnnnnnnnnnnnnnnnnnnnnnnnnnnnnnnnnnnnnnnnnnnnnnnnnnnnnnnnnnnnnnnnnnnnnnnnnnnggcactggtgctgaaggagtggagtggcctctcagggaggggcatgtgagagaaagcgcctggctgcccttggacccccaggcagggattctggggcgtagcacatccttgaggtcccgtgtcgtcgtctggcatctttcaccattttttgatcaaaccagatttcaacattatctttttctgctcatgaacaacacggccggcaagctgttctgtacagattgttttcttcttgtgttaattcagcaagtttgagacagaactggacccagctcagccaggaaactgacatgacagctcagctctcactctcgatccccacgggctgccgctgtttggcagggtttgtgcgggagcagaattaggggacttttgagcccgtggttctgaagtggtggagtcatctgtgtgccctgctagtcatgagcctgagattcccccctccccgccccccctgcagaccttctgtgctggcaggtggtgacctcagacccgctcaggtgtcttactgatgccaagatacatcctcttcctgcccttccagagaggcggttgatactgatggcagctgccactgggctttgccctttctttgcttgcaggtgctcttatgaatggcggcttccacccttccctcccctggtggcggggctgcctgtgcctggagtgagaagggacagttggcatcaagctgttccttgcagactgcctgctgtcatgagctctcactggctggcattgacagtctcagcagcgaagattggaaagagaaagctggaacgtcaggcagagtgatggcacgcctgctctctagccaggtcctccctcccttctgcctccagccttgtgggaaaaggtggtggtgcttttcgagggctgggaatgtgtttcagagagggctgcagcagggctcctgtctaagcgtgtttcctctctgtgcacgtgtgtgtttatatacgtgttcgttttgtgttgctacacctgcctgtgtggtggggagctaagaagacgatttcaggcatccttcctcaggctctgttcatatttttgtttgagacatggtctctcactggcctggaactcaccatatgtactagactggctgagcaacgagccccagggacctgcctacttccttctccctgggactaggagtgcaggccaccatacacggcttataagatgatttcatgtgtttggttgttatacttacttgcatgtatgtctgtgcaccgtgcatacttggcacctgtagaggccagaagaggtcatcagagcccctggaactggacttacagacaattgtgagccaccatttaactgcatggaattgaacccagatcctctgggagcctctctccaacgcactcaccctactttttaagcacgggttctggggatcgaatgtgggtcctgtactcgctcagtaaggacctcacaacctgagctttcaccccagctctcccacctctcaggagtcttttagctgttaaggaagttgctgttctctagtagttagttagttacctggttaccttagctctccagtgctctgagcagctggccacacatcggtgacctgggttcagttccggttctgaaggtcaggagcccagagtccaggggtccatgtttgctccttcagggccctctgagggagaccttggggcttactgttcccgtgaatcctgggtttgaggacatgctccactttaccctcatgtgacttgccactttctccttaaggagtctttgatcccctttaatttagggtgacaccaccttgaatgtttaatttaggcccatagcttctggtggtaaatttttttttttaaatcacattttctctttctgggtaggggtgtatgtgtgctactacctgcaggaaccagctctctccctccaccatgtgtgtcccactgattgaactctgctgccaggctaagaggcttttactcactgagctgtcttgctggcccaggaggtaaatcttcagacggatcttcaaccctcaacctggtgttccctgaagtgacacagggtttgcacctggatcccaacctcaagataccccgtcctggaatccacatacagcaaggtctgccagtgttgctgcgactgttaacagggtctactgcactttgacctcaagaattcaccccctctcccccctaggtagggcattttgctctcttctggagccttctgggtagtccatcatcttgccctgggtctgaccctcctcctgtctgggtgtgatttatacccacaattccaagcttttctgttcttggtacctgtgtgcaatccacatccggctgatgtagtcatagccaccctgcacagaggcacatcgaacaatgcctccagaaggttgggtggcaggaacagagcagcgaggcacacctacccaacttcctaaggcagattaaaatagctccgttagtctctgccctgtgtgtgagagctggcgcattccctgcctgccttgctttggatattcactgtggcgtcatggctttcgaacacaccacctgttccttttaggtataattaactgtattttcggtacaatgcttaaattgtcacaactcagttcagctcttctaagctggcttttttgtccatcttttcatctgagatcgttgggagtggcttttgcgtcctcagaacctggacttgtctactgtcatggttcctccatgctccggatcctgcagggaccctgtgtgttccctgatcccagcatgggtactgaagggccatacactgcgttgctataggagagaggcatccttgccagacctcactccccccaccctcgctcccacttttctttctttctctttctctctgtgctctctctctctcttctgtgctctcccactgtgtgtctgtttgtgtgtctgtatgtgtgtgtgtgtctgtgtatgcacatgtgtgtgatgtggtacgtgcacgaatgttaacaagtgtgtgcacatatgatagatgcacatgcatacatgtgaaagccagaagttgacactggttgtcatcctggatcagtcttcacttaatactgagtcagggtctttcactggatcgggagctcacctgctcgctagtcttgctctaaggatcccctttctctgccttcagagtgctggggtcagaggtgggccgatgcctggcttccagctgtgtgctgggaacccaaactctggtcctcatttttataccacaggtaccttaaagccacagacaccttgttaccagttccttaaacattaaaatgatttggaattggtgcacattgtggtcagggcggccttgctttgctgtccggcagtttttgctggccacagctagcccgccacatcctctctgttgttgcagtgtgtgcttcggaatggtgtgtcttcctcatctctctaatcatagctggggatctgcactctgattgttcatgctgggccattcccctctttagagaggtagtaatgaggatgcttgaaactagcatttcttgctatcttgccttaccttaaactcaagccaaacagaacacccatcacccggagcaagccccgccccatctctgtaacaggtattggcatctcctccacttagcagatgacactgatatgtctgagacaatgacccagtgcctgaacccaacctccagctgactccacaagcccaggctcttctctgtcaaatagcactgtgttcaccctcctgttagctttcgcttgtgtgtgtggtggggcttagataaaatattgatgcagtttgtacactacgagacaagtgtgcccagccacagggaaaggacgcgtgccttcttggagatttctcagttgctctaaggagcttcctttactcatttctttattttatttttttttttttagttatgtgtgtgcatgtgcagatgtctggaagatttaccctttttctctgccttattttgggaaacagggtcccccaaagatattaaaatatacgtttacaattttagaattttcatgcaaaagcatttattgttgttgtgggaaaacgtttttgatggtcagttttggaggtcagaggatggagctgcttggcatctagtaccttaaggtcagagtgctgcagaatgttctggaatgccaaagacagtcttccagaaagaattctctgagtgccaaggggatggggggggcgcggggggagaatatgtttctgggctggagtttaaatctacagtaagtctaaatagatctgtcccttgtccagtgtttccgttttataatgaaacattttaagcttgccaagtgctttagaattaagcccacttagaataaactgttttgtttatttgtttgtttgcttgcttgctttaatggattccgtgtgcttttgtaaggactctcaaagccccagtctttaactccgtcaccaggggcatctacctcttggtagctgttctggatcacacacctaagggacagtaaattcaatgacacttatgacacggggccctttaggttgacatttccctcaattcctacgttgctactttttgagaagtttgaataaagacacaagcataaatagtacaggatgtaagtgaaaatgttttcgttttctgggtcattcattcagtctccttaaaaaattaggaagcgccgttaaatgtcttaaggaaagagaaccaaaagacaatcatttgcaaactttaaaaggtcaccgtcttttagctgcaggagggaaaaaaaaaaccattctgaagtggtccaggcagaggctcaggaaccaggcctttcacctgagagagggggtggtgcctctaagccacgcccacatccgtccatctccttgaacggcacctctgctcccagcatccttggaagacatttccttcatctctgtgtcatttttttttttaaaaagagctggtcagtttctatggcaacagttagattgaaagctgagcagcgatcagggggcgaggcttgagcgagccagcgggtggtggtgtgtggctctgacgtcaccctccgggcgtctggataggatgattccagctactccctttcagggctgctgtccagtgagcttcatcagctgtgcctgcggggtctctcagtgccctgcaaacagccttcctttcctctgcctctactccccaacccctccgcccctgtagagtcttcctttcctctgccccctcgcccatcctggctccagactatcgttaagaatgcacagccaaattctgcagtgtttggggatgctcttctgccgggtgttctggaagggccgggaggcatggcagcgtttgacttgacaattcatggcgccgtgaagtccgttccttcctctgcaagaatcctgactatgcagaaattcaccgacacggactattatgaactggattggtattatgaagaatgctcagacggtaattaaggcctcttcgggagagctggatgagcggggacattgtatctctggggatgtgtgtgtgtgtgtgtgtgtgtggggggggggtacagtcctccccggggagatgggagcacaggaactgggatcaccagaaggcaccgcaagcatgacagaggggatggcaggtgggcagggctcttgacagagggtgactcctgtcgtgcatagtcatttgtttagaatgggagatagatggcttttggtgtgctgggttctgggcttgcaagcatgggacttctgtaggactgaatctttgtgtgtgtgtgtgtgtgtgtgtgtgtgtgtgtgtgtgtgtgtttccctgtgttctgctcagggtactagaggctggatgcctgtgttcaggagtcagcagttggaaggcctagaagaatctgccctttccagagctcagaccttggggctggggtctcgtggagcctgaggaaggcagaaacagcttctccagcagcgggtgattcaaatgaattttgctggctgcgttcagcacagaggggtcccgggtgaggatggatgggacacagagagagaatatacccttctggggccatcaaggtttgtaaggagggtgtggctcacttgagaggatgctgcttggtggctggggtgtgtggctggacaggtgtcagcaggtttcgtacagggaggacagtgttgagaggaattctgggagggattgccaaggaagggctgtgttgggaggtactgttgtgggttgtagtcctctgccgtccttagttgctctttgcaaatgacccttaaatcaccagcctttaccaaaaaaaggagacaattaaattaacgtccacttcggaggtgtgttcttcagtggcgaagtcctctcagctcttctcaagctcgttaataggtgaggtgagtgcttattaattgactcagaagtttctgattgcttcaggcgtgactacgtttgaacatctgggtgatgtaacaggccggaggctggcctagttagtagagagccgtgggactatctccttgtcttcaaacatttggctgcaacagggtggccaagaggttttcttgggacatgctcttaaaaggcatagagcaactttaccctggcccctggcagtatgtagtgctggcacgtaggtctgtctgattttcagagattctgggtgacaaggagagtatggtgtagagttgaggggaagggtagatgaagtctttttctggctaaatactgttttgaatcaagtttccatcctgctacgatgcttgggttctgcttttcggaagccaccgttgaccccttctggcctccttggtgacaggatgctctatgacgccattcatttcatcccctgtgtctcattggcttagagagcttgggtgacagtgggtgagttgggcatgaccctgagccatcctagaggttggggagcagggtgtagtgtctggaccccgtgtactgtctgattctcagtgaagcccgtggctcagtgcctgtctggagaggcacaggagacctgttcttatctggcatccaccaggatgctcttacttcacagtctcagaggagtcacttggctctaggcattctgatgggtcctttccaagagcaagagaaatagaagaggggatggctctttgccccaggattgattgctagttgatattgactgcctttgccatctgaggacgtggagagcaagatcttcgacctttgtacctttggtcctgggacaagtggcgggttctaagaagatagcaaaataggagaacagtatctgggacctagaaatgacctgtctaggtaccccacaaatgctggtttccagtccccagttttcttccttcttcttgtatgtgtatgaagtcaaagggccgctttgtggaactggttctccttccaccatggtgtagctcctggggactgagttcaggttgccagccttgtgcagtgagtactgtgtccttactgagcacccccacccacccccctgctcctctgcagtttctaactacttgggtcctaaccccctgcaaatcacatttacttggcttagatggatctttcaaacagcagatcattagacacttgccttttctggccttatcagttggcctctgaatcaatactgggggaagcttaaaggaactttccatgataatagcaaagggtgagtcaagtgttttgaaatctacgaagtcatcatttatgccagaggttctgactctttgagatggtcagttgcactgaagatgggaatgtgcaactcagggcagtgaggacagacaccccctcctccacctccctatccaccctgcaccccactcgacaaagtgttgtcaggaacccggtgtgtttcctcctgatctccgactgctaggagagcctcccctggtgctgagttactgggtccatttcccacctcagtttcagatgtgctggccttgctcgatcacgtaagacattaaagggtgtggggagggtctcagggcaggagctcatcataagagtcagaggaggctcattgttcagggccttagagtaatttgcagcccccatcaacacagtgcacacagcattgtgagtctttgcagaatgcatccacgcgtacccagatttcacagtctaaactctgagctaagcagtgttattcactttcattgggtaaagttttgttagtagcttcttctttttttttttttttttaatttttgacagattctcttgtagtccaggctggccttaaatttgctttgtagtcaaggaagaccttgaacctggtcctcctgcctccacctacagagggctaagactacagtgccaatgtcataagtgaggtcaccaggaaatgaccctccatgatgggccaacggtgctctgtgacaccagagagcatggcannnnnnnnnnnnnnnnnnnnagctaagcagtgttattcactttcattgggtaaagttttgttagtagcttcttctttttttttttttttttaatttttgacagattctcttgtagtccaggctggccttaaatttgctttgtagtcaaggaagaccttgaacctggtcctcctgcctccacctacagagggctaagactacagtgccaatgtcataagtgaggtcaccaggaaatgaccctccatgatgggccaacggtgctctgtgacaccagagagcatggcagccagactgaatcagacccaagctgaaggaggatgagtcccgtcagccactacaaggagggccagaggacagcacctctctgtggagagggaaaggcagatggagcaagtcttagcatctgggaccctggatgaaaatacgcagggaatttggttccttttcacgcggcttttctgtaaacacagctatgtccagagaaattcgcagagcctctgcttagttctggggcggtgcactgtgcctttaagagctttcataagcaagactacaggaactttggtttgttttgatttttgtaggtgtagtctttcttgagcccactttaagtgacacccctgtgtcaccctgctgagtgctgggattgctgacatgagccacacctggcttggggggaagatttttaaatggtgataccctaagctctctctgtgtgtgtgtgtgtgtgtgtagacatgtagttagacatgtgacttggacagcattgctaaaaacaccctcaatttaaaccaaaagatgaaacgtgaataactcactgatgggtgaaattgctcgagtttttctgaacgagtgaaatgagcctttgttgtcctttatcttccgcgtaccgcatcctacacgtccagcagtcagtccagctacgtggcgatgagtcacattctgcgtggggaggtcccccgcccagcacgtccctcctacacttttggagtaaccaaccagttttctcatctggaaaagccctgataccctggctcactatctcttaaagttaatcagtaagcatgatttgataatgtttattaagattaaactatgtttttaactgaatgtgtgtgtttgagataccaccttgctgtgtaacccaggctggcgttgaactccttggtgctgggaatccaggcatgtggtaccatgcctgaatcttggaagcattgtgtttaaaccctgtggatacataatttttcagaaaaatttgaaattctaatcttgaaatctgcctgtgattttctgcaacattgtcttttccaaacacaatcttaatgtgttaaaatggagcaatcattttgacgttctaaaattttaacggaagtataataatctgcctctagttggaatttttaagtaaaatctttatccttctgtggcatcctgctgtggcacatgattttatactagtctttataaaggtagcaactcagtgtggagtcctcagccctcagcctccaggcttagtaaaacccagtcctccgccttgcctactgctcttcccaagatctcgctgctgggcttcccttcctggctacgtggcaggggacagcggccagagagatggaagtcgcaggtgtggatttgcatgcagccgggggaaggctggaacctggggaccacagaatgagctatgatgtccagttgcggtgcttggtcagggccaactcacagagaatcggataggagcacctgtgttgttatctgtgacaggcaaactcaagcaatgcagggaatggctagcaaggtacaccatcaactgtggctcttccttggggcaccattgtaagctattaggcggtcagtttttcccttgtcttgctctagcagtgagagaattcttcctggatttgtagacagagcttgaaggggaacgtgtataaaacacagattaatgaggaaaataacatggctcttgtgccgagaaggtctgggtggtggtgtttagtcaggtgatggtccctgcacatccttcttcatttgtgagagaagtcaggatccctgcccctgggtccctgtagtccttggctcctcacagtctcctcagattcctacgagcacacccacaggaagtctctcagctcagaggtgttgagcaatgcttcatcagggcaactcctccagccccagccgcagcgccttcctacagacaggtgcacctgcttgaggcgtggctggtgttttcttttgcagttgctatgaaactttcaggacgctaccattcctgttcttctcaagggggagaaaggccaagagcgtacctcagggcaccgtacattcctgcctggctcccctctgtgtgcagggcaattggcagggtgctgctattccaacaggtgctctgcctgccgtgctccgcctccgaggtcctgtgagccactctgtccttccttctcccagtgatgctgggcgggtggccctgtgcacacccgtccactcctgccaagccagggcatgtctgcgaccctggctggagcccagcatgtgcgctttgggccccgatggctcctctgggcaggtggccaaaggctctcccaaggacagtcccttaggacaatgtttcaaatttggggcgacttcaacaatgtccctgagagacgtgggaggggaagaggaatgttttgaatacaactaccaggatgaagagaaggcggccatccccgagcagcatgataccctggacatcttggcagccacccatgagcagaacgataccatggacattttggaggatggtaaatgctacgctttaccttgagctacatagactacttgaggcttttcctgttagtgtccagccaggcaagattggccactgatgttgccatattctcttagttcttaaaggaacaggtgtacaaatggcttgatgtccaagtaggactgctgcccaggtagtgcagcaccccggggcttctagaacatctcagcatcccttttttgcttctgcaacctccccagaaaccataactctgactcttgcccgctcggatctgcctcagcccgttttgatcacataaggacagttaagcagtgtgtgtgtggttctgcatcccgcctctgtggctcactgtatgcttttggttttgaaatccctccagttcacaaggtctggatccctgtttgcccagcactggtttaaagagtgacaattgtttggtaactaaatggtctttagtaagttgatggctacacattttctaccaagcagagtgaatcagattttaataactggtttcaaatgtggattttgttttctttttgggagacagagtcttgtctatgtagcccaggctatcctaggattgttcatcatcctgcttcagcctcctgagtcctgagattacagggctgtgctgtctcacccagatgggattttttttttttttttgaactttgaagtacttcagagatatctcagggtaacatggtaaccacctgagactgggagggctgcttctgagcattcttggatggggaaaacaggttccctgcagcatgcccaaatattgatacaagttaactctagccagacttctgggtttcactggcaagcttgagaaaaatggttttggaggtgaagcaggtagttaaacaatggctacagcagtacccttgagcctagtgagtgatagctgtcaactgcttatggctcaggctaacttttcagaagtaccaaaaccaccccaagagctcaaggtctcttcttttgaagatagcgtcctgagggtgttgttgctgcctcactcccagagcgctgcaagctcttgattgcagagaagagtagtggggcagccagagaactgagaatccgatgaggccaggagcttgtctgctgtctcaccagaccgtgggagggaaggcacagcggactgactgacagggatagtgttgggggaggagtgccaggctgataggtggtagtgtggggtgaggtgggggacgacagtctggtctctagatactgatggagtcagcagttgtcaggttcctgggtcctgattaagagaaggcatggtctgtgccgtggaactaggtccagcccagacagcattggctctttttcctgtcctttaaagctctgtgctccagggtggcacaggagactttttaagccatgattcatgtggttctaagtcagagggtacacaggactctggagtggtgccagatactgtcagagtggaggataggtgcatggaacactccacacacatgcacgttcacacacatatgcacattcacacacatgtgcacattgatacacatatgcacattcacacacatgcacattcacacacatgtgtacattgatacacacatacacattcacacatatatgcacattcacacacacatgcacattcacacacacatgcacattcacacacatgtgcacattcacacacatgtgcacattcacacacatgtgcacattcacacatatatgcacattcacacacatgtgcacattcacacacatgtgcacattcacacatatatgcacattcacacacacatgtacattcacacacacatgcacattcacacacatgtgcacattcacacacatatgcacattcatacacattcacacacatgtacacattgatacaaacagaggcacacacatggatgcgcacacacacatgcatacttatgtacatgcatacatgtataaatacacagatgcatatacacatatacaatttatctttctatgcccacattgatatttttcagttgataactgcagatgatcatggggtattgttttgtgccaagggccatttgaagtactttatgtagagttatttttgtatagatttactatttgtttctgttttttgaggcagcatgttactgtgtagccctggctgtcctggaacttgctatctagaccaggctgcccttgaactcacagagatttgtctccctctgcctctccagtagccggattaaaggtgtgtgccaccacattcaacttaaaatttttttttttttttttttttttttnnnnnnnnnnnnnnnnnnnngatagtgttgggggaggagtgccaggctgatgggtggtagtgtggggtgaggtgggggacgacagtctggtctctagatactgatggagtcagcagttgtcaggttcctgggtcctgattaagagaaggcatggtctgtgccgtggaactaggtccagcccagacagcattggctctttttcctgtcctttaaagctctgtgctccagggtggcacaggagactttttaagccatgattcatgtggttctaagtcagagggtacacaggactctggagtggtgccagatactgtcagagtggaggataggtgcatggaacactccacacacatgcacgttcacacacatatgcacattcacacacatgtgcacattgatacacatatgcacattcacacacatgcacattcacacacatgtgtacattgatacacacatacacattcacacatatatgcacattcacacacacatgcacattcacacacacatgcacattcacacacatgtgcacattcacacacatgtgcacattcacacatatatgcacattcacacacatgtgcacattcacacacatgtgcacattcacacatatatgcacattcacacacacatgtacattcacacacacatgcacattcacacacacatgcacattcacacacatgtgcacattcacacacatgtgcacattcacacatatatgcacattcacacacatgtgcacattcacacacatgtgcacattcacacatatatgcacattcacacacatgtacattcacacacacatgcacattcacacacacatgcacattcacacacatgtgcacattcacacacatatgcacattcatacacattcacacacatgtacacattgatacaaacagaggcacacacatggatgcgcacacacacatgcatacttatgtacatgcatacatgtataaatacacagatgcatatacacatatacaatttatctttctatgcccacattgatatttttcagttgataactgcagatgatcatggggtattgttttgtgccaagggccatttgaagtactttatgtagagttatttttgtatagatttactatttgtttctgttttttgaggcagcatgttactgtgtagccctggctgtcctggaacttgctatctagaccaggctgcccttgaactcacagagatttgtctccctctgcctctccagtagccggattaaaggtgtgtgccaccacattcaacttannnnnnnnnnnnnnnnnnnntatatgcacattcacacacatgtacattcacacacacatgcacattcacacacacatgcacattcacacacatgtgcacattcacacacatatgcacattcatacacattcacacacatgtacacattgatacaaacagaggcacacacatggatgcgcacacacacatgcatacttatgtacatgcatacatgtataaatacacagatgcatatacacatatacaatttatctttctatgcccacattgatatttttcagttgataactgcagatgatcatggggtattgttttgtgccaagggccatttgaagtactttatgtagagttatttttgtatagatttactatttgtttctgttttttgaggcagcatgttactgtgtagccctggctgtcctggaacttgctatctagaccaggctgcccttgaactcacagagatttgtctccctctgcctctccagtagccggattaaaggtgtgtgccaccacattcaacttaaaatttttttttttttttttttttttttggtttttcgagacagggtttctctgtgtagtcctggctgtcctggaactcactctgtagaccaggctggcctcgaactcagaaatccgcctgcctctgcctcccaagcactgggattaaaggcgtgctccaccacgcccggcttaaaaattaatttttgttctgaggtttctttctcattttggttttggtgtgtgtgtgtgtgtgtgattaccgtgaccactgaagtcagaaaaggatattggatcccctgtggctgaagttagagacagctgtgagccattttgtgtgggttctgggaggttcaggacctctgcaagattggcaggcactcctaaccactgaaccatccttccagccctgtatggattcatatcttaagcttttaaaagaaccctgtggggttaaaaatatgttatagtctgcacccacctgtgctgctggctagctgcctttccaattccaagcatcttccaggcccttctaaggcatgaccattcttggccttaccccagacctcaaactcctgctcagaacgtaggggtgagccccagcagtccggggggctctatgcacagtgctcacccgagtnnnnnnnnnnnnnnnnnnnntctgccagcctctgcctcctgagtgctgggactaaaaatgtgcactaccactaccacctgacttcagagcctgacttttaaagcacactttgttgaaaacctacagtcctggatgccctcagccatgggaagttggctgtgtggcctttgagttacgagcaaacagcgttttcttgagggatagccatgcctttgtttatgttcacatgcccacaagtgtgcacatacatatattgcagagctgtaagatactctttcatgtgtttatgctgacgttgactgggtgtcctcacagcagctatgcatctattccaccaaaatggatgaagagtgtggtcttcaagctctaagatggccaatcaggccacagtgtcaaggagcttacacgcctgttactgtgacatggtggcacagggaccctcggaagagcaggtggcagccatggagctgtgcagttcctcaccgcctaccccaccctcagtgcatctcctctctgctctttcggcccagcactccgactttctgctgtctgctctagcctttgccagtcagcatttagtttattcccttcctcattccttctacccctgccagcctgaccccatgaccccatgaccctaaccaccatcatctccttccctagtagggtttgtgtctgagtcctcagtcaaggtcactcctgattgggggggaagctggggtctgccagtatgtattctcaaaattatttgggggtgtggtttaacttgcataaatatcacacattggttttcggatccaagcacccctcagaacctcagcctagtgctaggtgtccctttctctggtcagctagtctaggcttgttccccaagaagaaagtcttagtcccttccagctactcaaagtgggagctcccaaactgcagtgcagcccagccagccagttcccaggagagcatctctgtcaccaggccttctgtgacaaaggcgctggtagtgatgttcagagctcactctacaacgctgtgactgtcccaaagtcatggtttcatttgcagcctatcttgctactgatctggctttggaggtggggtgtgggggggaaggttaattgctcttgttggctgtgtctgagcctacgctatgttctacctcctactaagtccttatctcacagtgnnnnnnnnnnnnnnnnnnnnttcaggacctctgcaagattggcaggcactcctaaccactgaaccatccttccagccctgtatggattcatatcttaagcttttaaaagaaccctgtggggttaaaaatatgttatagtctgcacccacctgtgctgctggctagctgcctttccaattccaagcatcttccaggcccttctaaggcatgaccattcttggccttaccccagacctcaaactcctgctcagaacgtaggggtgagcccagcagtccggggggctctatgcacagtgctcacccgagtctcctgagactagtgaggctgctggggagctgggttgggggctgctgctgtcctttcagtcttaccacagacaattacagtcaccttttcttgtctgcctcttcagtctcctcatttctccagtaaggtcttcctggctgcccagttgataatgttcagacagtatatttttatggatagtaacttcaaaagacaaatgacactcagttgccactgaaatacagcaagcagatctttgaggcttgcttttggctcaacagaactctgtggttcagatcggcaaggtgtggcttcctggtcagttttgccgggaagctgtgatatcacccagagccaatgggccggaccaggtaggccccagctctactgcttttcttgtttcccggctacaggtctaggagggcaagagaagccttcagtgattggtgggggcagagggaagtggctgccgaggtcttagctgcaatgttagctactctaaaaggaagcacttctggtcagagacggaagcagggagctaatgatctgactgatcatggtggatgctgtgcgccttagtttgtggttccccctgagtggcctgtggctgcaaggcacactttctgacctcagctggttactcttcaatacagagacttggtgtgcagtatggtatttcagtgcatctgatacactcactgaatcatgtgaagaaaaaaataatccaaggttgagatagacatctccattttgcagtcagaacacaagagactcaaccaggttggccctgtcctggggcttccccaactattaacctggggtgggtgaagatcctgcctgtgtttacagctgaaggacccttagggggatgatacaaggtctgccccttcttgctaaggtcccagtgacaagccacagttcaattcccccagggtataccctgggacactggttagtgttctgggagcacggatgggggacattgaccaaaggcatgaatgaccccagagcagccacacttgatggtctgcacccagcatggatggtggctccccatgactgcacagaaggagccccattctcatgttctccccagccagtgtactttagcccctacctgagaccccagggcaatatgcagttagaattgcatgcagcgggttagaaagaggagctagacagtcatgaaagggtcccggaccccactccacatcctgtgagggagcatcggcagtcagcaagctcctctctggtgatgtcttgcaaacaggcacagctgagctcctgaagatggagtctgtctgactgggaggatagtgctctaccacagaccccagtgaggctgacctagcagggccttgtgagtccttcagctatacacccaggctcttcctcatacggttccaggcctttgtagaccctatgctcattttatctcaggccactatgaagctgcagcaggcgcaggtgatatccagtgctgggtggcctgctcagatgatcaatgctctaccaacaccagggatgacatcaagcagagctgagcggtgtgaagggagtgttcacagcctctgcatgcctgaggatcacactggtatgaggaaggcacagtgagagaggaacagaggctgtggtgtgctgcctgcctggcaggtctcatgctttctcaaggaaatacctgcctaagcctggcaccttcgcctcttctcttgcctggcctctccccagttacaaaaggagttgtgaaagttaggcaggtgttttccgggattgctcagaaaccaggatttggaaagaggatgcagaatgggccggagtgaacggagaggccagatgagagtgtaaccatgccaatagcaagatactccaaagagacagtgggtcccttcttatgggtatagactgtgggcccccaaaagtggggatttccccagagtatcatggggagaaggaaagggtggaagtgctggtcagaggaaggaggttgatagcgagtcagaccaccagggagactggctttgggacagcgatggtagtgagaccaaaccttaaccttggatgcttagctaaggcatgcctcttgtcccctgtttaaatctcatctttatgtcaggaccctaaagtagattcagaggtcattggacccctttagttccctccctagagtggccacattgattatggcccctttctctgctttctgctgttccttgtttaagtgacctattgaggacatgtagctgaacttggtgtatcaggctgttgaggtccaggccctgactctagcagctctggttctaacaagaactaacaggttcagggtccccgagcgacagcctatgcgtcctgctatccccagagtagccccctgtgtcagagagtaggtgttagcaaccacttgcaggaagttttcagttgtgagcactagccagaagttagaatccggacaaacagagacgggatgacatggcagctactcctggaaacccagagcccaatggagaaccttgagctagctcccacgtcagcatccagggcggtatctgctggatagccacggtctccagtcgagcctctaaggggcagcttggaagatagtataaactgaacattttcttccagttcaaagggactcctgggctgcaaggcagggtggctcagcccatcagaaaatggatgggtctgtatacagagctgagaagccttgggtcctgctggctatggaatataacattgtgtgaacagcagaatgcatgggtgcttggacgtcactgtagcatcacaggcaagaaacaaattagcccagagcaactgtggggcaccagcgtcaccccttagccagccccgtgcagagatcatccatagtctttatgttagagtcctttgacagatcctatctaactccccaatggcatctttgcctggcactgcctgcctgcctgcctgcctggcagctgctctgtgctgtgtagtgtatgtgtgtcttaccttttcagctaggtcaagaattctttgaggggtccatctgttagcttaaaagatagtggtctctggcagttcatggggaaaacaggtcagtccccccaccacccataatagctctaaagacactggggtgggctcttctcctagggtggatatcagctatgaaggcgagggtatgcatacacacttggccaagggccagggcaatggtgcattcccaggaatgagcaacttgattcattcctcactaaaagccttggggataagtggccaccataggtcaacacctagagttccagtctggggtgaggtctgcgattactgtgttaagtccgtagttacacctcacctgtccttgaaacttggcctcgctctctgtttgatttgttatatgggactcctgtttgcattgcaggcttgttctggctataagtggaatagtgtttataaagtgcccagggaacatgttgttaatctcagtaatggtcagagcctgtttttcctctctgccgtgtgtgtgtgtgtgtgtgtgtgtgtgtgtaagtgcatgtgcacgtgcatacacacccaggtgcatgtgcaagtttatgtagaggccagaaattgacatcaagtgtcttcatctatcagttttcccttattttttggcacgggctctctccctgaacccagagctccctgagtagcctggtctgtccgtccagcaacactcaggtcctgtccccaccccacccagcatgaggactgtccagcttttcaccaggtttctggggatcagacttgcctggcaagcactttgctcattgagtcaggtccacagccctctctctcctgtgactttagtgacttgctaggtaccctcagcctcttgggctactgactgggctgaggggcagcgagtcaataaagcagtcccagggcttcagaactggcttgcgagctgcccttgccaccttttctccgcttggtcgccaaatagacatggccagggctttctggattgctgtgtggtgaacctggctctgggctagcctctgcccatgctgctatttcagggacatagtgtgcctttgtctggaagccagcaggccagaagcttctgtggtgtgggaggagtgtccacctcctcctgcttgctaaggtcccaggtctctgccactttcccctcttcatttcttgtcagcttgtttgcaggaagtttcagggccaggtgaggggactcagttgcatttttgggggtggtgacgtgtgttcacctcctctctggaacattaggtagtaatggactgttctttgcaagcaaaaagatctctccagttttcttctgggtatcacctgtatcctatgcagggcaaggcagcctcctggttcctctgcagttgttcctggatggttccctgcctggcaacaccattgcagcccagacaaggcatagtcagggctgagggaacaaaagaacgttttcacacattgctatagggaagtggtagggatgtgatgtggtttagtggtcctcgtttgcacgtatttggttactgaaaataccaggatgtaatctgtattctataaaagtcatccattgttaccaggcggtttcaggatttgtatgaatgccctgaattgtgcaacccttcctgcaatttgcacgtagattctgcttccttttctccctagtaagaacctcacagtctttgcacttagctccagtcctaaacaaatgctaaggcaccttctctatgagtagaatcctagaacaacattttatgtcttcccgcccccccaaggataaggattttgaggtttgtttatgttgtggtatgtatttgttccgagttccttttttatgtgtaagcaatattccacggtatggatacatcacgctctgttcatccaacagttaatgtatcttgtttctactttttgcctgtaacgattgccatgagcattcatgctcagtttaggcagaggcttgtcttcatttcccaccggcagatacttaggatgctcaaaaggctctgtgaccttaggtaatccagcttacccttcttagagccttggtttccctggcaacatgttcagtttactcagccctgtgtctctgtggggttgctcctgttccgaattcacaagaaccatgcaatgacaagttgccattggttctttgccagatctccttggtccatttcacagatgtgggctcgagaggagagatgtgtctagggtgtcagctgctcatagggacttccttcttgctgggctgtggaaagagcaggaaattcccaggtggagacgtgagagaaagacagtctccccagaggaaatagcaggtgcggaggccagggtagacaccgagcgtggcatcactgggcgtgcctgaacctggtggagagtgggcatgagcacccgcaaggaggtggacagctgcctgctccagaggcggatggtcctggacgtcccatgtctgcaggctgcttgttgcaggaagtggcagcgctgggtacattttaaagcgggacatgaacgtgttaaatcaaaggcatgtaatgtagactagctttacaagatgtttgtcctgtgaggcccggaaacctggtctgtgaggtgactcaaccaggatttgatagggagcctttaggctgtggctcacaggtcctgggcctccacccactgctgtgtggacagggcagacagtaggatttattacgcttgcttcctgtggatcaagggccagactggagcgatgcttcttgtcctgacacctgctgttgcctccacgggcatgctggtatttctggggtacatgtctgcttagtcagtatatttccaaatgttttcttacatgaatacatttgtgtgtgtgcatgcacatgccttggcgtgagtgtgcaggtcagggacaacttcctggaattgactctctccttccactaaagtgtgtcatgggaattgaactccagttatcaggtttggcatccagcctctttacccattgagccatctttgctggctggcctgaacttcttataatacaagttataagtggataataagctacaagcgacaagaggaaaaattccttggggggggcagttagaacctttttatttattttttcttggtttttcaaggcggattctctgtgtagccccagttgtctggaactccctccatagaccaggctggcctagaactcagaggtctgccagcctctgcctcctgagtgctgggactaaaaatgtgcactaccactaccacctgacttcagagcctgacttttaaagcacactttgttgaaaacctacagtcctggatgccctcagccatggaagttggctgtgtggcctttgagttacgagcaaacagcgttttcttgagggatagccatgcctttgtttatgttcacatgcccacaagtgtgcacatacatatattgcagagctgtaagatactctttcatgtgtttatgctgacgttgactgggtgtcctcacagcagctatgcatctattccaccaaaatggatgaagagtgtggtcttcaagctctaagatggccaatcaggccacagtgtcaaggagcttacacgcctgttactgtgacatggtggcacagggaccctcgggaagagcaggtggcagccatggagctgtgcagttcctcaccgcctaccccaccctcagtgcatctctctgctcttgcggcccggcactccgactttctgctgtctgctctagcctttgccagtcagcatttagtttattcccttcctcattccttctacccctgccagcctgaccccatgaccccatgaccctaaccaccatcatctccttccctagtagggtttgtgtctgagtcctcagtcaaggtcactcctgattgggggggaagctggggtctgccagtatgtattctcaaaattatttgggggtgtggtttaacttgcataaatatcacacattggttttcggatccaagcacccctcagaacctcagcctaatgccaggtgtccctttctctggtcagctagtctaggcttgttccccaagaagaaagtcttagtcccttccagctactcaaagtgggagctcccaaactgcagtgcagcccagccagccagttcccaggagagcatctctgtcaccaggccttctgtgacaaaggcgctggtagtgatgttcagagctcactctacaacgctgtgactgtcccaaagtcatggtttcatttgcagcctatcttgctactgatctggcgttggaggtggggtgtggggggagggtgattgctcttgttggctgtgtctgagcctacgctatgttctacctcctactaagtccttatctcacagtgtcactcagggaggagccctctggaagaatctagcacatttattaacaacccatgtcaccaggcttgctatgtgcatcatacccagtcactccacactgggccaaaatgttttgtgagatataaaccacacaccaatgctatcctgtgaaaaccctctagtggttttctataggcctatgacaaaagcctgaatccttagcttttggggacagggtctcactatgtagacctggctaacctgtacactcggatccctggtgcgtgcttctatgtctaactaacaatcccagctctttgaagggctttgcacccttcagcccttcaagctgtttatttctgaagtgtctcctgcattgacctatttcctgtgcaccccaagggtgcaggatgaccgcatcccgtagagtcacgggtggtgcagaaggctgagagtgtgccctgtggatctgctgtctgaggcaggatgcatttaatgcctttgttagcatatggaccataatgtttctgaattctagagatttgtagctgctttctctcaggacacattttggggtggatttgatagcatggcctgggtccctgtggagagaggacatagccgagctctgtggtagaaagccaaacgtgagaagcagagtctggtttactcgccttgtagttgaaaggcaggcttgttcctttctaccacctcatcttttgaaagagggaacctaaaacccagcagttagggagcccgcctggggcctgggttcccgaccccaccttctgtgaaaacctctccaaggtcaaggattcttttctctgttgtgcaggttcaaaacgttgctctgccctttatggtgccctgtcctgtttgagttcaggagtcagactggtgaggttcagctcctacagtgtagcttcagtctctttgacctgcaacgcttgttatgtggggaaactatcctgtgctgtgggagctcacagtgaagcagcccctggaagccgggctgctcgtcccacttcagacctaagtgtgtttgtgtcctccaaggccctttgactgaggatgagttgagccccagctctgacaggaagggaagaggaaaactaaatagcccaagagctaatgcattgtgttgttgccgacagctaggaggtaagctgtttccaatagacgctgctctccttaggcccatgatataaaaatgcctacaagtgggaagggagaggccaaagctcggccccgggaagaccgtccatgggagaagctctgtcaggagctccagctgtacctcagcttccccctgtgttttctgctggttgtggtaagggtccagtttgatgatgtcatctctgctgcttgtgcgttcacttcagcttggtgtatacttcataaactcacccctgcggtgccctgacctctgcagtactgtccgtgtcaggtcgcggcttccatgttgaagtgccctgaaggtttgctgggaagagtcgatgggaaagcgtcagaagcttcccagacacagaggttacctgctgccctgcttagtctgtctgaccttgagttctgcagcccccccacccccacaccccggctgggcctgatcttctgacttgtgaaagggtgtgagaaaccactctgaagtgctctgagggttgcatgggctgtgtggtcagtaactgacctcagtgagcatgctcgatagaagcagcctggatcaattgctgcatgatgttcagatgaggtcagcatcttcctgtgccccataagatgcatctctgtcatctgttaactaagagaaggcttctgctgttactaatttatcttaaaggtcagccagagagatcctgtgaccttatattagtcaactgtctatttcctgtaaaatattttaaataatttccctcgctagtgtagtgttgctatagttattttttagaatcatttccccttatttttaaaattttttattagatattttctttatttgcatttcaaatgttatcgcctttcctagtttccactccgaaaattccctatcccccacccccccttgctcaccaacccacccactcccaattcctggccttgacattcccctatactggggcatagaaccttcacaggaccacgggcctctcctcctattgatgaccaactaggccatcctctgctacatatgcagctagagtcatgagtcccaccatgtgttttctttggttggtggtttagtcccagggagctctgggggtattggttagttcatattgttgttcctcctacgaggctacaaacccctgcagctctttgggtcctttctctagcttcttcattggggaccctgtgatccatctaatggatggctgtgagcatccacttctgtatttgtcaggcattggcagggcctctcaggagacagcgatatcaggctcctgtcagcaagctcttgttggcatccaccatagtgtctggttttagtggttgtttatgggatggatccccaggtggggcagcctctggatggtcattccttcagactctgctcttttagaatctttttttttttaaatttttcgagacagggtttctctgtatagccctggctgtcctggaactcactttgtagaccaggctggcctcaaactcagaaatccatctgcctctgcctcccgagtgctgggatcaaaggcgtgtgccaccacgcctagcttagaatcatttttaaagcacaagcaaaattaaaatctgtgatcctatccaaatgttcatatttttgtggttgctttgctttttattttctgtatactattagtgtacgtgtgtatatgtatgtatgtgtgtaggtgtgtgtgtatacacacacacacatacacacacgcannnnnnnnnnnnnnnnnnnncacacacacatacacacacgcacatatctctccttaaattgtgatagtatatatagttaaaagcatacatactgaaatatttcacataagccttgcttagagcaagcagtgtttttttacctggatgtttgggctcaggcaatagactgcgtcttgtggaatgtccttccaccccggagcctctagtgaggttgtcagtcttgagaacatgaagggggcatgcccagcctctttacagtctgtgcctggtgacagtgtgggcttgagaagagactggaaggactgccagctctgccgtcaacatgtgtgtatgcaaatgagcatcatgccatgggggacacacagatgacgatcaatgaaccagagaaggctgaggcagcattcagttctgacatgcacatgcgacatttctatagaataaagccatttgggactcgggtctgacatgcgatatttctatagattaaagccattttaggatttgggttagggcacagaaggatccatctcccattttattaagaccgcacatcactgtctgtctgtggttacaggaacacggcagagatcccggcttggtttttgagttttggtttctcttgcctctgcctccctcctgctgggattgcaggtgtgcacaactgtgtgtggttcatgtggtactggggaaggaaccagggcttcatgcatgctgggtcagctccatcaactgatgtgtcctatcctagaatttttaaattgtgtgacctctgatgagtgcagggctggagtaagagcctggagcctttcctccgagtggaacctcacagctgctcaggagaaaaacaagtgctcgtagtagcccagccgtcctcatagagacaacttgttgaccttgagccactgaactgtgcagagcatttgagctagattccatggatagcagattagactacccctttatacacctccctgccattcccttgccggccaacgtgaaggcaaggaggaaggctaaagagccaggtggtgtctgctgccagaaggcagaggaccctgtgggggaaatggctgccgtggaaggggaggaggcagaggacaggctctcgcttccaggtttcctgtgcttcagattgaaagccagatttcaggctgggcctgagctaggaaatcattccagaagatcaggtttctctgagctcatctctaggatcagctctgcttgcacactaaaatatttacaggctgccgaattccagtgacagctctctagcaaggctccgggtgtgacttggtgagagactttgtgtcccaggtgcctctcatcggctgtcgttggatgtgggtcattatgaaagctttcactgttaataggattattctccagggttgtgttacataacatcgctgtgaagttgtgtgcccgagtgtgtgtgtgtgtgcatgtaggggatgctcatggaggtcatgtgtgcatgggtgtgagtgcatgtgtgtgcatgggtgtgtatgtgtgcatgcttatgcatatatgcatgtgtgcatatgtgtacatggaggcatgtgtgagtgcctgtttgggtgcatgcatgtatgtgcatgtgtatgtgtgtgtgtgcagcagccatggtggtaatggctgtgcagtagattttcaaaggacagcactctaatgctgctgatacagaagttttagagtctaggccagtcaggaagaagggtgtgtgtcactgtgaacttgtaggttttggactgttgtttaatagttatacagacggctgctttctgaaagctccgacctaccgtgcccttgtctctgtggtcagtgggtaactcacagcccagcgtcactgggggcagagcctggtgatggtgaggatggtgtgggttgaatccctgatgtcttggtctgaggagccgagttagatgcccacctgtagccagctctctgctgttagcgatctcactgccttttctgtctcttgcagttctatgtgccgaaagagttggccagatgactaaaacatacaatgacattgatgctgtcacgaggcttcttgaggaggtgagtgtctgggggaggtgagggcctttagagtgggttcgtgtgggcacctcggctgtttcaggagggaccctcacgctgtgccttgtagtatacaatttagtgttttcattttgctactttgtttattttgagacaggatctcactgtgtagccctggctggcctggaacttgctatgtagaccaggctgagctagaactcatagagatctgcctgccgctgcctcccaagggctgggattaaagatattcaccattacaccgaggagctttatccctaggcctttgcagctgttggctttgtatacatgaattagatttgttgttaccgtttacagcaaagtcttatgaaggctgccctcagatttgctgtgtagctgacaccggcctcatattcctgatactttgacctctgcctcccaagggctgggattacagaaacatactgtcatgcccagctgatatatgagattggagttatccagcttgtgacattgcagtgtgacattgccatttacacatatgtgagcccacattcgtagccatcttgggatgtacacagtcgtcaggcctcaggctggatacacctgtggggtgtatacagtcagcagggtatagatcagatatacctgtgggatgtaaacagttagcaagctgcagaccagatacacctgtttggttttgatattctgaattgatggcattaaaaaaaaaagtgtcatttaagtacttgtcgggacacccagcttctgatcagagagtcctatcaggagaagagtatgttcttgcttgtggtttcggaacgtagttcaggaactttgttcagctggctggtggagcggagcgcagcatcaacatagaaatacaaagcagcaggagtgcatgccatggctgatctggggaaagcaagtcagatcaggcggatggcatgcccttgagagactgacattctcagctggtcttagtgtcctgttttcatttgggaataggggactgtgacgccccctgaggacacatgggtatgccctgggtacccaaaggccagggtagggcaggccccaggagaaatactggtaatttttttttttttatgcctgtgaccaaacctgacagaaacagcttgtgggggtcgggaagagggtgctattttgggcccacggtttcggggatttcagcacattatattaggggaaggggtggtagggaggcttcccctgtggaagtgagagcaggagggcgtggttgctcagttcatggggttgcaaggaaacagaaggtggctggaacccagtgccagattataacctgcaaaagctggcccctgctgacctactgcctgcagccaggatctgcctcctcaacatgatacagcctcccaaaacctcactgccagatggggatgggactaaggggataggggtgtgtgtgtgtgtgtgtgtgtgtgtgtgtgtgagtgtgtgtgtgtgtgtgtgtgtgtatgtatatacagtgcccgcccttcagcaatggccccaccacaaacctggccttcagtgcacaggcagctctgggccttgattctagaatctaggatgactctgtgtccagtcactttccattagcagctccccaggaagagggtgggaatcttgggggagacactgaaggcacagtgactgttgcaggcagcggtgggtgagactgcagtatgggcaggtcctgacagtgtggtgggattgtggttcctgcagcccccaaccctctgcccctcacgtcttcctctcccttgcattgtttcgtccttcggtgtatgtgacatttccactcaccctggcacacatctgttctattctgaaggaggagacgagaacccctcagctccacgtaggtgataccaggatttgggactctgtggtggtcctcctgccttctggtgacactaggttgtcaccatcttgaggctggtgtgggcccagcttcaggctctcttggctgcatattgggtttggaattggacctgctgacctttccctgtgtgggatttctcccccgtttgagggcccttttcttaggaccatttctctaggcctttgtgggggattctggactcctgagcctcggtgttgagcgtcaccctctccctgctctaagtccttggcctctgctctcatcccacactctccatggttgccttacccacttcctggcctgcatccagagcggcccacaggtcaagtccgtcagtctgcactgacctgcctcactctcatgctgtaagggcctgtgaggctgctctggaacctggccacggtagcacgggagcctttgtgttggtcagtcttgtgtctgaactcctgccgtgagattccgtcccttctgtgggatatctgtctccagttgcacttgtaggggtgaaatctggcaagcagctaactgctgtagatattaattgggggtttctgctccaccctagatcatttagttcccaaataaaggacacaaaacctttatatttattataagccttcaacactagagctgggcagatatcagccctctgtgctattttgcctgctttcttgtcaataatcccaagctgctcttactccaacaggctgacccttgtggccatgtgtgcacaatccacccaccccgtggtgacttctacttctgactccgtcctctctctgtggtctttgcctcagagccgaagcctatttacctgtcttctgcacagctacaggctggaggcatctctattcaaccaatagttttaaattaaggagcagggcttgcacaaccaaagctggcatatgtgagcattcactctgtcttaaggcaactcgaccttaggatacaagatttggcattacaattcatagcaacagaccaaacctcaacagttgtccatctgtcttacattaattctacagctgctcttgatggtagatattgtcaccgtggagggacctaagtctgaaggacagacaccaggatcccagtgactttgactctggctcgtaaccactccctgatgggactcagagctttgcccattgcatttgacaacacttgagtctctggcaatatggcttcttggttgtcaagacaatcacttacaggccctgtgcccttgtggctctgggcatccacagcctgtagtccttggctgtgatagatgaggcctcattgtgggtgttattccatggggtacctaccaccttgctctctgctttaacattcaaagtcccttccagacccctcccaaggtctccatccctttatacagagtccctgtatgaagaactccccgctttggccaggctggtagtgcttgcctgcagtctcagcccctggaaggacaaaggaggagggcaaagagttgaaggtcatccccagctagctagggagtttgaggctagcctggactacatgagatttgtctcaaaatttttgttttaaagaattctcttttccttggttaattttctgactaaacatggccatatgaaatcctagctttaaaaaggaaaatcacatctccttagagcagtttctccccttcccccttcttagttactgctttcttgttttatttttgataggcaatcatgcctgcacctccctgttttataaatagctgctgtcccctttgtccttgatcctgataagatatcacagggaagtccctgcctttctctggaactggatagctcatagtctgactgctacagccaccttacaccattcttgcttgggttctgtgcctctgttcaggaatgctggtgtacataccaactgcatactgtgtgctgcaggattttctcaggtcactcaagcacagctgcaagccgtgtgtgtgtgtgtgtgtgtgtgtgtgtgtgtgtgtgatctttaggcttgcctgccttgactgtattgaaatgtacctaagagttcactgcttctgccccagttagagcatgccttctgctggcccatagttacactttttatcctaaaattggtgaatgggatgagtcactgctgagcgtgggtgtaggctaagcatctccacggagagtgccagccagcccagtgtgtgttggtgacaagggccaacatcaggttgtaggctttcaagccaccttgattcatttctcagagagtaaagaaatggttttgactggcttgttccagggcctgagttagttatttatagtctgtggtgaccaataaggttaaagccaaactaatttcctgactgttttcttgattttagaactaaatgttcaatttatgttgactggcaacaagaaatgggaggtgactcctccccgtcccccgtccccccactcacacacagagacagatacacactcacacatggcagacatgtgcacatatatacactcacacatgcacacatgtgtgcaggcatgtacacacatacatgcagacacactcaaacatgcaggcaacatatagacacacatactcatacatgcaggcatacagacagacacagagagagacacgtaggcacacccacacatacatcttgccctatatctgtgattctcaaaagaaactaagaatcttgttgccttgataaacctggacagagccaggtgtggcagtacagggactaaggcaggaggaccaaggattcaagctgagccttggctgaactcctagaccctctctcagacaacactatcagacacccaaaagccagaaacaagctagacaagatagactggaggcagtacaggattcgggttttcctgtttctcataagcagtttttcatcccttcctgcttttcatcctgcagacatgccctgggtaattactataaagattagatttccagcgtaggcttgtgatagctgctcccagctgggtgggcagagagcaagaggccagaggccctgtagctgtgaggtgtggtcaggggcaaagggctttctgaccttgtgtgtttgttcctgttctgttctctgtccttgtccctctgaggtgccagccctccctgccccttgggaagccttgcccttcatgtcctccagctgcagcttgctttgtagtgcaccttgcctcactggctgtagtgctccttgcctctctgactatggtgttccttgcagcactgcctgaggtgctctttgcctcactgactgtagtgctttttacctggtagtgctccctgccttgtagtgctccttgccttatagtgctcctggcctcagtgcctgaggtgctccttgccttactgtctgaggtgctctttgcctcactgactgtagtgctcctggtgctcctggccttgtagtgctccttgctctgtagtgctccttgcctcagtgcccgaggtgctccttgcattgagaactcacatctgtgcttgttggaaattagcacctttgatggggtgaaaccatcaaggaacgtggtcaggaagtgagcagagaatgttaagcttctgccgagcaccccgcctgactgggtgcttgtcctggcaggggatttaacaggcctgagggaggccgagggaggctgagggaggctgagggaggccaggcttctgcagagaagtgaacattgctgctagagcatttttagccacaggtgagaggactggaaccattttgacttaatgctaatcttgagtttgcctctgggtactcacatcccaggcagccttgccacaccattcttcctgtccctcccctcaagtgagacacggccagagtctgaggatgacaaagggccacaggtgtctccccatggcccttgaggataaagtcagggttgaacatctctgattgctgggactgccagtgtgtcccgtggctgccagcgtatcccgtggctacgtgaagctccctttccatgcgtgctgagcttttgtgtgataagggatggtgggaaagcatgtaaggtccgactatgtagtgggtgtctatggctcacttctgtagacacacagccaaagcctgagcacagaataacgcccgtgctttgtgggaggcattgtgatattttcatttttgagctgtcatttttcacctaaaacagtgtcaggagtggattttaatggtgtgtgaagtgtacttaggcgtacatcagaagtcaccgacaagcaggtggcactaagcccctctctcctcggtgactggtgtgtgctggtctcaaaacccggagttagaaagttacaaataatccaaagtagaaagttacaaataatccgagttagaaaattacagataacccagcctgtctgtgaggagcagttttgatttttctctaatttttaaaaaggcttatttttatgtgtatgaaggttttgcccgtgtgcacatctgtgcaccgtgtgcccggtgcccacagagaccagaagagggcatcaaatcctctgggaaattacagaaggtcatgagctgccgtgggggtgccgggaccagaacctggaccctctagaagagcaatcagtgctcttacatagcagtctgctacatgacggagcccatggtcagaacaggcagccatctgaagccccggactgttcattacacaaggctgagtgtcccaaaccaatgaggtggggagtttgtgaaggagcaagtcccgggctgtggggggagaggatgggggtttctcataacccgaggcctttagaacgactgtttctcacagatcagcactccagccatgcttgccttctccacgttggcatccctttctgtacaatgctgcgtgaaaagctcacctgctttcctgtgcctcttcatctttttatgatctcatttctgtcatgcaagttaccaactgtgattagtgatttctcacctctgtggcttgaacaagactatagtgctgctggttctggggaaaaggaacactcaggctatgagggtagttagtacccagtgtggaatcggagccttcaaccgtctctgctccagccggcccatccagcttcttcgtagagtaagtgaagagggcagttggcgtagactctgaagtggtgaggtctcctagaatgtcctctaccttaccagcctatctaatgcaagtaggtggagcttactgggatggatttggagttggcacctgtcccctacctgggacatctttcttcccactgaggcagccgtgcctttgtgtggcccactctgtctgcctgttgtcatggctgaattgtcagaacagcctgttcctacacgtacaaagcctctaaagtatgagcagctgatacaggttctctgcccttacagaattattcttgtaaataaataaaataataagaagaaactgaaaaaagcaaaacaaatagagtcctatctaatttattttaaacattgtttcttccttggttacaatgcggaactcagcatgttctagttcagtcctcctgatatgagctaaagatgcctgtcttcctacgcaagctctttgctttattcaggagcatagtcactcacctgcccatccatccatttatccatccgcccacccattcacctacccatccacccacccattcatccatccatccacctgctcattcatctacccattcatctatccatccacccacccattcacccacccattcatccatccacccatctatccatttattcatctgtcatctacttattcacctacacatttgttgggcattgggctatacacagatggcctggtctccagctgagatgttgaaccctgggaccggtgctgataattcatctacatgggatagaaggagttctctcatgtttcttggaaccctggctcctgtcaaagttacctctcccctcagcccccacaggagaagtgtgtggctagcagtcatgtaggcaatgtcccaagcttctgaccttcaggctaaactcctccccagttacctagcaacagaaaaggtagcagcatactttaaaagggtctgtttggcctctcctcactctcttgctcctctctctttttgtcttttctctcctctctcctctcccactctctccctcttattctctagcctttctctctctctctctctctctctctctctctctctctctctctctctctctctctctctccttttcctccttctctcctcttggccatggccagtctctctctctttaccttttctctttcccctgcctttctgtaatcaagctctaagcccatagactgtctctgtttagctgcacttacttttcttacttttgcctgtgtgggaacctctcttccctcagtcctctctcccataaccctggggctacagggtgtggccccgggcccccaggtcgggggctaccccttgtccatcccccgtcgagtgggtcagaggcttggatgcccacttggggctgagtggaaagcatctgttcgtctgtccagagcataggaggaactctggccagacatgggctatcctccctccccccccttcccctggaccccttttagttcccacacacattcatctatccacccattcatccatccatctattcatccatccatccatctacctacccacccattcacctactcactcatccatccatccatttatagattcatctattgtctaccaattcacctacctattcatccatccagtcatccatccatccatccatccatccatccatccatccgagtcaatggtgtttccatgtgctggctctcaagtagggagaaatattaccaacgatttaacaaataaagcatttttgcctccatgtgcctggttttcatcaacttttcctgcgtggctcctgcacatgtgtggccaaggttattgctctttaacaggcatctagtacctggatggcgaactgttaatactcttactgtttctgggcatgcccatctgacactgaaccctgttggctcctccaggatgcacagggttaagtctgcattctccctcttgcctttcatagaaagagcgggatttggagctggctgcgaggatcggtcagtcattgttgaagaagaacaagaccctaactgagaggaatgaactgctggaagagcaggtggagcacatccgggaggaggtgaggactgctggcctggaagtagtcagggagatgggtgggagtacgggcaggtgtggcaagacttgtactcaagagaacccagacttgacatgtagaccttctctgctgggtccttagaactagcaggtgcaggagcagctgcccttcttacactgtgttaagtacaggagcggtgcaacattgtggcctgcagtcttcattgtataagctcggtgcaacgttgtggcctgcagtcttcattgtataaactcggtgcaacattgtggcccgcagtcttcattgtataaactcggtgcaacattgtggcctgcagtcttcattgtataaactcttcatttcatggtgctcaggctgtcaggggagaggacagctgtggactatttcaccatcaccaaggggagcctagagtcaggaggaaggatgctgactccctggaagtgatgtttaaactgcatggagacataacagtcagctggggttgccagaacagggatttggaggtcagagcccagctgtccatggaggcttctctcctctcgtgctgttctcccagcagtaagttttaactctgaggactcttccttcccaccttttcttcctttctgtccatcattaacttccttagtgggaaaggatgccctcaccaaagaccctaagatgtagccagtcttactcccttttctcattaaagctatttcagatctgggcttaatgttttcaatccacttgtaagaaagtgtgtcgcccccagcttgctctcaacaatggtaagctggaatgctgtagtgttgcggggagaaataatgttcttgctgtccctggttcagggaaatggcctcagttaggtaaggaagcaggtcggctttctgagtagagggagacatcacctaggtgtcagcgagtggtcgtctactggcctccttcagtggccatctggtgtgagactttttgggtgtgtacagagagcattctactccatgggagtggagatggcctgcttctcaggggaagctttgaactggaaagctatgatgtcatgcttccctttggggaatcatcaagtggcccctctaggtagggagaacctttatgcagcatataaaacaagtggactcgccaaggatggccaagtccacgccctgcgtggtgtgggaaagttggaacaaacccctagccacatcagaaaacagacttcagttctccctcacagccctggtccctcacttaccagcactgagtgctggaaaggcaggtgagaagttttatggtagctactgccttgtctgaaagcccacaccagccacatggcagagccacctcatcagtcagcagcgtggctttcctcaagtcttgtctttcttcccataccctgagtttctgcccagtaacctctaaatgcagcagagggtctgaccagcttgttgagggacactgaggtgtgctggtcacatggagggctgtgtggttttctaagaggggtggagtctggcagcccacccagaggcagcacagccatagatctgctctgagatggcactgggtgggttctgacaaagtgagtggcctctcattttatttagtatcatggcccactgttctggccacttgcccagctggtcacctggctgcttccagagccaacaagcatcaaccccctgatcattccagagccttctgcttgctcccctctctgctcttctgaccaaatgtgaggacatagaccgtttccaacccagaactgatggactgggcttttcttaaacattgtcaaactcaaggctttgagactctgagtagcaaaccagccttcacttgggatgccacccctctctggcgttcgagcacagaaagacgttgccaccttccagcaagcatcgatctgcccccttgctgtccgcacaggtgtctcagctccgacatgagctgtccatgaaagacgagctgcttcaattctacaccagtgccgctgaggagagcgagcctgagtccgtctgctcaaccccgtaagtctccagcacaggtgcccagagctgagggcaggcgggctgatgtgcaatgggtgcccttggaggcccctaggcagggccactagcgtcttggggatagtctttcccagaacggccatctgaaggcctcaaatgacaccacctcactgcttcaagtgagctgctgagtggagggcagtttctctcttacaaggtgtcaatcctggcttgtcagagtggccctttgccctggcacatccgtgggaatggggtgtgctcaatggtggatgaaaacatagatcccggagcctcaggtccttgggacagaagtctggatgcttctgtgaaagccaggagacccttgctcttgggagcttagtggcctgctgtagggacacagctgtgttgtgacctcaccccatgttgatttcctcattgtagcatggagctcttaagaacatgtaggtcacagggtcatgagcactgagttcacatatgaggcagatatagaacacttaatttttaatttatttatttgtgtacattgcggtgggtgggtgggtggggccacggccgtgacatggcttacatgtggaggtcggggacagctttcgggagttaagtgttctccttttaccttgttggtcctgggctggttgtcaggtgtggcagcaagagttttcccttctgagccgcttcagcagcccacaaaagccttccttgtgaatagatgcgcatctcgaaattgcattggttaaatgaccctggccctctggccccctgttgtgagctaaggtggctcaggtgacaagggcctcgcctctctgattttgagcttgcttctctcctaggctgaagaggaacgagtcctcctcctccgtccagaattacttccacctggactctcttcagaagaagctcaaggacctcgaagaggagaacgttgtacttcgatccgaggtgacaagtgtaccccgctctcgccccttgggtgggggtgtccctctggcagcgacagcttcagtgacagtgccatctgcttagcgcccatctgaagacatcctgattgagcttgcactctccagtcagggtgctcggctgcaggctccgccttgtgtgggcgtggcttccggggcggggcggctgtcgcagtgggtggagactgagtcgggtacaggcacgcgagccgagcgctggccggaaggctagggtgattgttaaggagtagagatgcaccaagaggacgacgtaccaggtctcagtaccaggtctcagagacaggtctgccatggtgaacttggaaaggctgggccgaggcagcctgggaacctggaaggcactgtactaggcgccttcccgacgttgttaacgattgttacattactgttattagcatcactgctgttagtcttcacagcggggcctacagctgcttactttgagtctcatttgcagtgagactcaggtgccaggctgttgggtgtttgaagatgtcagagttaataaatgacaaaggccggatccgcagcctctggctctaaacccaagctttttcccccctcacccaccaccactctttaaaacctctgattcgagtagatttagtgttttttttttttttttgtctttattagcattgagcttgtctgtaggcaaagggatggcccttgtctatcagatttgggctgtgagcctaccttagctggctctagacttccagagacaccccaggagggcagaccatctgtcactttgaatttgccacacactggaaagagcctcctgtcaaggcacaaggaactctttcccacggcctatctttgcagaccccacactagtcagcgatttagggtgactgacaatgtcacccaggcttggtcttacagacccatggctgaagaagggcaagcccatgcttcctagctgcagtctcctggcatctggcgcaggtgactgcctcagtcccaggcacccagcccctccatcccaagatagaacacaagggctctgatccaggtgtggtttcttggtggccccatgtgtgccctcagaattttcatctctgcctgtggtcagggcctaccacactcttggagccagctgtctcattcttctctcttcttttcagccagagcaagctgtctaaagtcctacaaatagctatgtgtgccttctctcttttccagttttgttttgggagcaggtctcactatatagctctggctgtcctggaactcactctgtagaccaggctagttttgaactctcagagatatgctttccttcacctcctaagtgctgggattaaaggtgtgcaccatcacttccagactatttggtttgtggggcttttgtttgtttgggtcagggtctctgtatcccaggctggcttatagcttactgtgtagcccaggctggccccaaattcatggccagaccagtttttctgccttagtcttccaagaggtagggttacagggataagcccccaggcccaccattttggaaagactcttgagaccatgtcataacgctgtctttaacatgttgagtttgttcttagtagactgggtcagacagagttaatggcacttcagaacctgtgtctggtatggcaacagttctattcctgtgtggctgttcacagagtagctgctgtggtcagggcagtgtcttaggcatgataaaggccacagaagtgttatatctatgagagctggatgcacacaggcaagtagcaaacagactaacatgccatggcctttcagtggtagaacttgtgctcccatctctgtgtggcaccccctggtggtgcctagccttcaggtctctgctttagggcctcgcccatggcctaggcagggaatgcaggtgaggtatgtctctgcgtggtgtgtgatggtgcagggacagagatgttgaaagggatcataccagagcctgagactgcccagctctgtgcccagaccctggtccacctgatagtcctgactgtgtggacactgtcccctgactgagcgtcattcatctacatccacaggcctgtcagttgaagacagagaccatcacctatgaggagaaggagcagcagctggtgaacgactgcgtgaaggagctgagtatgtctgcccctcctgcccggctgcccctcctcctctaagatgctcccaccacctccccagcagccaacggctccgtggcattctctgaaagcagaaggcctctgccagcctgtatggcaacctttgcttgtttgtgagtcgagagccatgctctcagtgaggtggatatttaattttaatgtctactcagtattggaatattgtaatcatttgatgatgctcaaggtcggtcggcccagatcaatgatctgatttacaacaatgaaggcctgactctcagctttgctattcaaatcagtgaccttccccatgccctccgttatgagtttccaggtaagataagagaaagggcgttcagcgaagtgaaacacaactcacattcatgtctagtaaaatgggctgcagctccaaatgccacggaaagccacaggcaaagtgctccatgtgcagagttcctgttgtgatctgttcacagtggagcactggggttcagccaagtgcagccatctttggggtatcacttccagatctcttcctggagcctgccgtcctgccctgaggacagccttggttagtagagtcagccctcacaggagagacagccaatgagaaggctgggttccttctctttccagccccccccccgcagggaccacatcaccacttggaaagatgtcctcttccactccctccgtgctccccatccccactcctccccgtaaagacggtgttccctctttggtctgtgtgtggctttccaactcagccacctgcttgtcattacttcgtcacaggggatgccaacgtccagattgcgagcatctctgaggagctggctaagaagacggaagatgccgcccgccagcaggaggagatcacccacctgctgtcgcaaatcgtggacttacagaagaaggcaaaatctgtaaggcttctgtgtctctgggtgacgaggcagtggccatgcggggatgggacaggtggttagtgggaggcccgttccccacctgagccatgcatactttttcctggaggaggcttagtgagctcaggcactaaccccaccggcccaggttggccgaggcgttatttatgatgatgttgctcctaagggtgatctatagtggagttcatagagaagtgctgtagatacggagccttgggatttatctgacaaaccatggagtctgctgtttgttgtcccttcagatattgtctgtgggagagtggtgtgtctgactggtgtcccttgggctctgactgggaggaagagaggaggtgcctctggaaaagaaggaagggaaaatagacagaaaggggaggggagggaggacagactcccagaaagcactcagactctggaggtgggggttgggctatggagaataatcaagtgccaagtgcccagggaagactttaccttcaaaattacctggcgggctcagcgagatggttcagtggagaaaggcgcctgctgccaagtcctgagttcatccaatgctcataaggtgacctctgacctccacgtgcactgtaggcacgcatactcacatacatacttatacatgcttatacacactcacacacatacatacacacacatacacattctctcatacacatccttacacacactcatacacatatacagtcatacacacacacacannnnnnnnnnnnnnnnnnnnatatacacacacatgctcacacacacatacatacacagacatacaaattctcttatatacacacatatccatacatacatattcatacacacacatatatacacacatgctcacacttatacgcactcacacataccctcacacatgaatacacacattcacacacatacacattctttcacacatgctcatactcatacacactctatatatacacactctcacaccctcacatatacacattctttcacacatgctcactcatgtacactcacatacacacacacgtgctcacgtgtgcacacacatttactctctctctctcacacacacacacacacacacacacacacacgaatgagaacatttttaaaagcctgtcttttttttttaattatatggaaggcagtgctctgccatagcgtcgggtgcacgcttctctctagacagtgctgagcttctcacagacaggtaacaggaggggacagtcgggctcctgagtgtcttaacagaggtgacttttctttaccatgtttagtgcgcggtggaaaatgaagagcttgtccagcacctgggcgctgccaaggacgcccagcgtcaactcacagccgaggtgggtgtccctgcctgaactctctcgggcctcgggttccagtgaagccactcccccataggcccgggtccttcccctcataccaaacacttcactcttgaattagcataatactgctttgcctgggttctgtgcctgccgtttggtgtaagcgtaaggaggctggattcagtacctcagggcctgacatattctaactcctgatagacactagataggtgaacaagatgtgccacagacttgtaaagagcctgttcaaagatacaacttgaatctgggcattgtagtacatatatcccagtccacaagtggctgaggcaggaggatggctatgagtttaaggacagcctaggctacataaaccgaccctgtatcaaacaaaagtgaaagatgcagctggagaagagggtttgcctcttagcctctttaatgttttgtctgggcgttttctttggcttgcccactgtgagcgtgtgagcagctttccgagtctgtgaaaagccagccttgtggatccaacccgctttgccgtgggcccacagggccacaggttctgcctctcaggcgggagggctggtgggtgtgttggctcctgggtgctcactggtgctgtctgagaccctctgcctctccccacagctccgagagctggaggataagtacgcggagtgcatggagatgcttcatgaggctcaggaggagttgaagaacctgcggaacaagacgatgcccacgtcccggcgctaccactctctgggcctgttccccatggtgagtgggttctcctgtgcgcctctccccagaccatcctcagactttagcgcccagggcttcgtgtccccttctgatccctggtcctacatctttcctgcgagctgcttgcttctttaaagtttgcactggacctgccagctgggggctcctgattccttgagatggactagctctttataggctgctctccctgcagctgttaggagatttttacaaagaacttgatttagttagatgttagtctgggcagctattacccatgccttaaagagcctgaacttctcctggttccttgtgtgtttattaacccttttgttggtgtcagggatttgaaccaacttttttaggaatagcattcccccatgatcttattttgttagtcctggtgtggcttgtttgatatcaaggctctgaagggctttggtgacggacaaaggggtttccagtttagtctccagtcatttccctgtgatatctacttagaaggaagtgagcgtgctcattgtatgttctaccagaccatagcttcctaagctggggaagccacacattggctgtgtcctacagcactgtgggtgttagcacaagacagtgtagagctgtagccagccaagcagcaactgcacgtggatgacaggcagcccgagaacaagcccccaagagctcctgtgggtccaggcgttgttccattcgtctgcagaataacagattctctgcaaggcgagaaaagggtcaattttttaaattttaaaaatgtttatttactatttttgtgtttgtatgtgtgattagagttggttcatgcatggaggtcagagggcaactttgtggagtcagttctttgggtcccagggatctgatcttcactctctgagctgtctcagcagctgagaagggattgagggaggagtctcttgcagaaatacttttcctgggaagtctgtttctagtcaccccagacagagaaggcagtttctatccaccccagacagcccagttaaacagtttctcccaagtcctgcttggtgagcctgtaagtttactgggtaacttagaggagaacggccaaggccttaaaactgtcacaaacccaggctggggagatgtcaggctcagcacgttaaaaacactaggatgtgcaagcctgacagactgaggttgatctccagagaccataagaaaagccagatctggtggcatacatctgtaatctctgcattcatgctgtgacatgggaagtggagacagggaacctgccagaaatttacaggccaactagcctggaatactgtgaggagtgacagaaaccggaaagatccccatctcaataagacaggaaagaactaacgcccccaaattgtcctctgacctcagcaggtccaccgtagtgcacaagcactgtcattgtgtccctgtgtgtatgtatgtacacacacacaattaaaaatatatataatttaaaaagaaggaaaaaaaatcaaaccatcctggctagcacacaccctggagtctccactttcatgcttactgaaagcttttgtttgcccgtttcgagactcttgcaagctcaggttttagagaggattgttctgaaagtctaaaggctgcagcgtgcccatgtggctggagctgagcgcccagatctgcgtctgctctctgccactccagctgccaggagcagctttcctcatcagcgttttcaattccattgccttgtggtgggatttttcaatctgcagtccacaggcagactcgggtgccccttgaaccttgttggggaaatttgtcctctgttttcataaaccttcctcacatggtggggatgggtgggggtgggggtcaacctcagtacacctgggtagttagcactccaggaccagccttcccctgaccctaaagcttacactccctcgtcccctcagaaaagggcagcagtgtagtccagaaagttagtaggaattaaagagctaactggtgcactgtgtggaagatggggtgcggtggggtcagggtgggcagggaatgtctgcaaagagggagtacagttttttactggaagcagcagtcctgtcacctgagaacacaggcggttgccatggctagctggtggagcaaggagcttgcagagaaagtacagcagtggcaacatgtcgaccacagtccatgcaggcagggacctttccccagcaagcagaaccagagagctttcagcaggtgattgtctacctaggagtcaggtgaaagccttggcctcctgtgtgtcataatcctgagtcactgggaccataaactggactgtgtgggaccttttggaagtttagagatatttggacttgttcccactgttctgaacacactctcctgtgccccctgatttctccatcccacatcgtagccacaattttagctctgtcatttggtcaaagagtgcctggctgtcagacactcagctacgtgagagtcaggggctgttcacttaaacccaaaggtgctgtgtgctcagaacttgccctggccatggcttggcagattctctctgtgtagggattgcttttagccttgtgttgtatggcatgaagtctggagactgctgggtgcctggtctcctcctggctcttctggccacagacctcatctagaaatggaagccttgagcccctgctcagtccacgcatgtcttctgtctttccccaggactcgttggctgcagaaatcgagggaactatgcgcaaggagctgcagctggaagagctggagtctccagacatcacgtatgaccttgtggcctttatatttcaagtcccctcaaactgactcagaaccggtgctcataacctagcgtgtatggaccttagacaccaccggccagccatggtccttccctgtcaggttaagggaagtagacgatacagtgacatctctctaaggctggagctcactaggtagcatagtttcctggcatgcagggccctgggttgtgtccctcatagcaccttgtggtaaagtagaggaaggaggctcaggcgttcaaggccctctttatagctgggattcttgggtcccatctcggaaaaacaacccaaaccaacaaaggaggttacctgatgaatttccagggagtggggaggatgctgggtttcccatctcccaccctccaccttttcccttaatggaaagcattacgctaaaaagtgttcatgtttgctaagaaaagaaaaacacgggctcttcagtgctgtgagccaggcttctgatcctctggctactcctggggtctcggcccctacatctcccctactgctgtgaacagacaccacgaccaatgcaagtattataaagaacaacatttaactggggctggcttacaggtttagaggttcagtccattatcatcaaggtgggaacatggcagcatccaggcaggcatggtacaggaggagctgggagttctacatcttcatctgaaggctgctagcagaatactgtcttcctagctgaaggctgttagcagaatactggcttccaggcagctaggatgaggatcttaaagcccacacccacagtgacacacctactctaacaaggccacaccttctaatagtgccactccctgggccgagcatatacaagccattataaccttcatggaacactgagagatctggggaccacgtctcctcctgaatgactagcgtcctggtggctttggtgtatgtacagctccggcatccccagaggaagcagctagtccgagcatatgcccaaccctcttccccttaaaaggagaaatcaaactgtgggcttcgtgcttagaaatggcagtttctaagaatagcccagtggggttttatcttctcaaggcagaaactccagactgccgtggagctctgctgtttcactttatgtgagtggttacaatggagcgagcacggccctcctgtggctctcattgtatgtctgaaagaagctggcctgccagggagaaagcaaccccaaagcactagcatttgtagctcaggcttcaggtcgtgataaacagagccatgtgggctagccttagctcatcagtgctgagctgtgctactgagccttaggtgcggttggcactagcatgctatgatgcaggcaccccattccctaaggagcatgtgaggcccccagacagcgggccacccacggtaggcatctgtggaggagctagctccaggttcatcctgatatgctggctcacggctgccctgtcctccgcagccaccagaagcgtgtcttcgagacggtgaggaacgtcaatcaagtggtcaagcagagatcactaaccccttctcccatgaacatcccgggctccaaccagtcctcagccatgaactccctcctgtccagctgcgtcagcacccctcgctccagcttctacggcagcgacgtcagcaacgtggtcctcgataacaaaaccaacagcatcctcctggagaccgaggcagccgacctggggtgagcggcgggctcctctccttctgttggaaggggtggttgggggaggagatacaccttgaacatgggctcagacaccatcggagagaggtggatgagagccgccacgtcccagttacccaccttatccatgacactggtcttttctggggtagtatctcgagctgatgtccacggtgtgctttaccataacatcatggagggagaactaacacatttcccacagatcatcaccgtgacccctcgggagcctgggtgccggcaagcgtaggagatcccaggctctctggtttgcttcagaaggtggaatgtaggggttctcagttgtgtgttccccttagttatggtcagttcctctccaccctaatgccccgtagaaccccagccccactcccatcatcctcctgtgcgccctggccctctgacttactaaaacagatacctgggaccagttaagccatcagaagggttctttctccgagatcagagcaggttttactcagaacggagagcacaggccccttcgtttaagagacgagagggttgagtcggttctccctcaggacctacgtacagccagccacctgcaaaaggtttcttccagaacaacctggagagagatgcttatgaagacacatttttgcaaattttcagtccatcctcgtacaaccacctgcctctaagaatagtcagttgagacccacagagggaactccttcagtggctggctggccctgctctcctcagaccatttcctgtctctttgccctgggtggtggtggtggggtctcactatcctttcctggttgtagatacttatccatgtcttcccaggaacgaggaccacaataagaagccgggcactccaggcacgccaggctcccatgacctggagacggcacttaggcggctatccctacgccgggagaactacctgtctgagcggaggttcttcgaggaggagcaggagaggaagctgcgagagctggctgagaagggggagctgcacagtggctcgctcacgcccaccgagagcatcatgtccctgggaacacactcacgcttctccgagttcacgggcttctctggcatgtccttcagcagccgctcctacctgcccgagaagctgcagatcgtgaagccactcgaaggtgaccaccaggggcctcggcccctctctgtcctcctctgcgactctctctgggccctgatccaccacaggaaagccagccaccagtgtcacacctattcatttttctttcgagatagccacccacgctgttggtttgagttcctctgaggtgtgccctctgtttcggcagtctctgtcgtggcttgagcagtacactcctgggtgaaactcccacaggtgcaggtctctcacttttgtccttaacactttaggacccaaatgtagtggcagtggcatagcttcagaccctcaatggtagctgtgtgacaacaagctacttctggataacccagggtctgagaggggtggggaagggatacattggcttctcagagattttactgtcaaataacgcaaagtgtacattgtgacccccgacccccaggcatgtggaagtgtcgtatgtgtgtgtgtgatcaatcacatgttccaacctgtttttcatagagaggatgtggctttctggaggtgtgttttgctgtgaactaggtccccccaccccaacccccagtctgaagtatggaggcaggagggagggagggatggaggccagcctgtttagactcccactaacccccctcccccatagtacttctagttcctagaagacctcactgtttcctctgtccccctgccttgtcaggagccacctagtgtgtactggttttgtgtacaccccgcccccacccccgccccccacatacacactttagtctgaagcccgtgtgagttgggagccctgctttagaaccacgtagtgtatttttgatgtgaagtcagacgtctgtatgtctgcactgttctgagcttttatcgttatcccttctcgggggcatctttgatgctttaatctagttacaccccacactcgctgcaacgtctcggtgccacagatggtttctgtcacacaggtacagacttgtgctccgtgcttatagagagcaaataactgttttcatcccaggaggggaccgaggcagccttactgggcaggcagcctgcaaagctgaggtcacgcctgcaccatggtcccagtgtccccaagaaggaggaaggactattttctttctttctttctgttttcatttagtgattatggtttgtgtcatttcggtcctccctagttctcaggacagggaggctctctcctttttaattgtttgttcagttgtaatcttggggattgttttctgacctgcaattatgtctggttttccttcaataaaaccttccatttctgcagtttatttccgcctttcttttcttttcttcttctgtctctcaaagaccattagacaccacctctcagcttcccattctttatcgtgtttcgttgggtcacctatgttacgtcttgggctcatttttttcaagtgcattgcaggatgagattttgaacattttattttgaccaattcatctctatttctctgaccttgtgccctgggtggcaatatttttatgacaagagtcagaggagaccccattcatttgtaagatggattttgcctgtggcaccctcgtccttcttatcactatggcctgtaacaaagccttgtgataaggatccttttggcttcattttgtgtttctcagacttcttccccagccgttcaaaagacaactgatattttcttccttccttcccctccacagtcaatatctgtgttgccatgtttactctaagatggggtgtgagtatagtctggcttcctagctacagcctctgaacactgtcaccgtgcctgccgagttagcttccctcttgagccatcttccttatttgtaacataggcaaatagctgtcaaacaagattatcagatttgtctgattcagccacatagatctgtagggcccagttaccagatctggactgtcattaccctgaggtcatgttctcacctggcccagtgagacactgataggagtgccctcgatcaccagcagtccagggaaaggcacctggggtgaggtccccggagaccactgtctgggagcatcgtagaagccaacagtgtcctctgtctagatctccttcttcatgccaaccgtcctgccatctcctcatgtgtctgccagcccagcggagctaggtgcggcagatgctctcacgttctcaccaggcctttcaaggttaggcaagtgaaggacagaatattcaagatagagagagttatctatcgcagagagaccaaccgaggcaggcagtagtccatctgtgttctcaggtgggtggcagggtgtggtggtcatgtcctgcttcctgctggataagggaacgaggctgggatggggagtgacacagaaagaaaggacagggtgaggcccttgtgctctggcctgcttcacagtcactttcacctttgctctccatatcaaggagaggatttcaggcagccagcctggagctgggtggaattcctaggtaagggcttggggtatgggagtgtcatggtgggggcttctgctcagtgctaggcttcttgaatacctggagcctcctacccagccagggggaagtgttcttgaggtccactgttgacaaaccaaacatcagagctaaggttgaggcagctttcgggtctgagggattgaaaacacctgtcccatgggcagagccgttgcctgggcttgctattgctggatccctgacgctcagccaggggaaggcattctcttctgctgagagcttccggggacagatgccagaggtggctgcttgctctaacgcagcctctggtgtctctctcccacactcagtgtttttgtctgtgaggaggagagacaacagggtgatcccgaaactaaaggagtcaggcgtgtggtgaggcccacactcagtgctgagtgatggtaaaacggtgtcctgacatacggacatccaggttgtccttgataatggcttctgccaggctctccccgtgaccttccgtgagaaagcacatggacattgtgatggggactgtcagaggtgacagaggttccctcagtgcatgagtgtctggccctcctgctaggccctggacatccacctggaagttctgctgtgggtcactggcaccatgtatatacctggtggccagcccctgctgccactgagcccacttgcctgaagcactcatgatctgaccccagtcacttagcgtcaggaaccttccattcccatttgtgcagtgagtgacactccctatgaggaagtttgaggagtgcatagtagtgcttatgtgtagagcacagcgagtttttattggaatatggagcatgtgccaccatgatttcacacaccagtaaacagaggcaggggtggagtcttcaggctgtcttcagttagtggagaagacaaagggttagcccaccagagatctgccttccatcatccctggccagaaagttatccagggagaggaagcagaggcagccagtcatcccatagtttagccttgcccctccagtcagagagttagcctgtctctgagtttcacggtgctgctacgttgtcctgttgctgctgatagtcttcctgcgtggtctctctgtgggggtctactatgactaccatgtcttgaattcctccccaagtctcatttggattgcaaccaggtcaaagaaatccttacaatgtatgtgtgcagaggcacaccgtaagtacccctgcagacagcacaaagttagaatgtggcttataccaacactaggagacagaggcaggcagatctctaagttcgaggccatccttgaatacagagtaagttccagggcagccagggctacacagagaaaccctggcttagaaaacaaaagaatgtagagtacagactaaaagtgttcctgcctgtccctcctgtcctctgtcaaggcacaccatactgccgtgtccgacgtgagctagccttaggaaacagttgtgtgtggcatctgggagctcaggatcccacagatgcctgcatgccccaccagttcgtgcatttccctctatggtcagtgcctgagcctgtggggcctcagagcatcgctgggatgttcagctcggccactgggtggcgctagcagcctagtcttctcccacaatcatggtcacaaaaatacctgtgctttgtcccaagttgaggactcgttataaaatctttatagggtggattccatttttaacaacctctttgttgttttgttttgttgtttttctttttccttttgtttgtagaaagtattttttaccccattcattaggcccaagtctatcaaggaggatataacgtgtgtccttaaacctggtgtggcccgtgaagggctgagggtgttggggttttcagtgtgtttagtttttctctttaattttaagcagaattgaagtagtccgttttcagaatccttctaagacctccatgtcaccccttacccggtgtccagccggggctgcccctcacccaccccaaccacctttctgtctctcctctcaaggtacaaggcactggcggcaagcagcttccannnnnnnnnnnnnnnnnnnnnnnnnnnnnnnnnnnnnnncactggcggcaagcagcttccactccacccctccccctcccccactccctgttaaggagtttttactcagctagaaagtagtcctggatgctgtgagccatggtgcaggcagtctcctgtctctgagggcttctctgtctgcagcatgaggcctgtttatttctggccatgtacatttgagtgtctaaacttttgtctgtagaagagggcttcgggtcccagccttctgggccttctgccagacgtggcatcctgcatggtgtgtcaggtgcccagaggctgggcagaagcatggagcaccacagcacactcatgagatgccgcttggctcctccacatccaggctcgcagacactcctggccttgtgacacctttcttggtagagcacctgggacacatgaggtcatcagggacacactccggtgttattacaaaccctctggctgacacctgagtcctagggtttggtgtcaccctggagatggcacctctgctctaggcttctgtgacttatttaccttacgtcctccctgcctcacctggtggctcctccattctccttccttagcttccgtttgcaggtgagtctggtatggtcggcagcagacttgtaccagagcatccgggtgtctttctgatccccggttgttctcctgatggcttcacaagtttcctgtggcccttgctcaccatttcaccctcttctgtcagcaaagtgataatgtgttaagtttgggtgttagcacctggtggtttaaaatactttgttaccagacatcattggcacacaatatatagtgtaattttacttttgaaagtattggttctttacagtgccactccctcctggtgtgacagggacacactgttgtccagttaggtcaagccagttctaccccagtccttcccacagtcagtcctgtgcaagctcaggtgaccccagtccctcccatagtcctatgcaagctcaggtaaccccagtccctcccacaatcctttgcaagctcgggtgacctcaatccctcccatagtcctgtgcaagctcaggtgacctcagtccctcccttagtcctgtgcaagctcaggtgaccccagcccctcccacaatcctttgcaagctcgggtgacctcagtccctcccacagtcctgtgcaagctcaggtattcacattgagctctgagggtgggaaacatttgctctagctgccatgctaactctcccttctcttggtatccactctctttcccccacaaggttcagccacgcttcaccactggcagcaattggcccagcctcatcttgggggcatcctggacccccgtcctggtgtggtcaccaagggcttccggactttggatgttgacctggatgaagtgtactgccttaacgactttgaggaagatgacacaggtgaccacatttctctggcgggcctagctacctccacgccaattcagcacccggagacctcaggtgagaggtctcgagcacgtgtgactgtctcaggcagcagaagttactccagccagcctcaggcttccccagaggagatgcaccagccgccagcacaagcgggcctggaggaggaggaggaggaggagggaggggtctggtgagggcgcctcgattagtcctgtaaacctgacacctttaccggaggcagagctctgggccttgctcgtctctgttcctggcaccacccgtagtaactctgtgtccgtagcttctgctcgtctgtgtggatgacaggaaaaagctttcccgttgtcaggctctgttttgaaaacagagaccagatcctccccttgtgacgggagtgggtccctctgcccgtcatggagccctggggccctgcaagcgggagcaggaaaggctgctaaaaagcgggatatggggccctgagaacggggacacccgagggttctgttacagccatcctaccctggatctggtgtctcccatgtcctctctggatttccagcctgagcaagctgggggaagtcttagggaaaaggcaatgactgagaagacatagaatgtgcggaaaccagagggaaagaagtgcagagagaggtcagaatgcttgaaagcatgtcagctctgtgacgtgccttagcctcagtgaaggcgcatgcgctatctaagtgtttagtgatactctttaaccaggtacacactcagaggtgtcattcagctcttacaaggtggatgctaggtgctcaggctagcccccatcccacctctcacctatgcacactaggctagcccccatcccacctatacacagtgtgaccacaggtgacccgtaaaccttgcactgggatgggaagtttatgcttgaggctcctgggacctctggggagttagttatgtggttactctgtatccagatgtttcatctgcctgctggagctcctggctcattgtgctgggacatggaagaactcgggtgtcaggaaaaatgaatggaccgatgcacaggccatccccaggtcactaaatgcaaggaaaggatattcctctttctccctcataattttaagaggccctgacacttggcttgttgtgaaatctgaggtagaatgaaggtttcggtggtgtctcataccacccccccaggttaattacaggcagccatggtctaagggcccaacctggaccaactgtttcttttaatgtcagccttagaggtgtcatcacagagtttatgttttgagtttttacaagtaagttagcaagtgatgcggaggaaacgagaacgtttgtcctgtgaggcccacagactcaattaggcctggtgggatagacgcagaattcccaggaagctgaggcaggaggatctcaggctcaataccaaaggactggaccgcagcctgcagtttcaaatctcccattgttatcagtactgggtccatccgaaggcagacagcacctccccgctgaggggagagctctgtaacgcttgttttcccaggagggagctcttttctagaagcgccacgaggagggaggggctgcagagccacacagtggcagggtggcagagcaggatggctccttttctccgatgagtgacagaaccatctgctgtcaggagtagaagtctaagacaccccaagttacactggataccccaaatgctctttatgcacagtcctgggagggggtggctaaaggctggtgagtctccatgggaagacctggagctctggtcttgggatttgtcccaatggcctggtccctgtgctcccaagagctgctgtgtacctgggaaggggtcagaggaaagaagtttgaatccgaaggcagttaggattacagctgacactgagcagggctgaagagtgggaagactcgccccgtagacatttttattagtgtgtttgagtgtgtcttttgaagcaccatttgattttttttctctttaatcccatgtctgatggaggatggccctatgctattgtgttgtaaattacctagaagattaaaacggatggttgaaaacaacttttaggtcctagttttactttattttaatgattgcttatgttctggatttacacaggaaacatatttttcaggatagtcaccacctggtcctgccaggaccctgtattttaatttatggctggggccagggacaaccggcatgtggggagtggttggttaagctctattgattaagctctattggtagcttgttggcggaatgcactacaggatttagctcagttaaattctcctgaagattcaaagtggaaggaaagatgagattaagctggcaccagagatgaactaaaagattggcttgtctgtcatggagactggctcatgaagacccctgggctgtatccacctctgtcccctgcagtgcacatggctcacaactggtcccaagaccctgacaccagtgtagactatgaaaactgcactcattcaaaacaggccactgaaggtctcttgtatctcaagccccagaatgccagaggcagaagccaagaaatagctttttgctgcgtcttcaccaacacagagatccgagctgtgctcagggtgaaggaataaaaagaaaagccctccacagaaaggaggaggcccggccagggaagcccagctcctgctctgtcacacagcagtgccctgagggagcaaagctctactccttgattctgtgtcccacccagcctcaccactatccacagaagagggtacagatgggcttgtatgtatgtaggagctggacaagtgaccccatgggtctggaagggaaggtaggtacaattggttcatagacctaatgggcgggacaattggttcatagaccttctggtatctttggcagaaggaacttccttcccatgttccacatgggacgggaacattttccaggccccggctttgcatccctacgtccatacagagtcaatgctctgctcacacccacctggttaagacaggctaagaaagtcccagcctctttcttttttttttttttttttttaaagatttatttattgattatatgtaagtacactgtagctgtcttcagacactccagaagagggagtcagatctcgttatggatggttgtgagccaccatgtggttgctgggatttgaactctggacctttggaagagcagtcgggtgctcttacccactgagccatctcaccagccccccagcctctttctaagtgcatttggtgaactgagaacaggccagctgcaacctggaaggagggcagaggaagagctgattcctccaaactggacagagcaggctctagagagatctgtgcggagaagcctttatgagcagacatttatgagagatgtacagacaggcagccaccaccttgagaacaatgggagacatgctctccaacctccccaagcaggtaaagaggctctctggcctctctgtgtcagccccagaaggaaggatgagcagcgagggccatggagttaggcctcgatggtacaaaaagatccagagaagagttttgcatttaccccgttgacagttccactgtgttctgaaactttctttcctcaagaggatacctcagagtcacgaagcagcttttcctgccctctctgcaggatgcaacgaagtgggttgtctcctaatgcacacacacacacacacacacacacacacacacacacacacacacacacatatatatttttttgtaatgaaacagacaacagtttgctgtgatgtgaatagaatgtttaagttcgcaagaactataaatatcagttgtgccaaatcagaaaaatgatcttatgatcctgattctattcagtctccacattggaaccttccagaaaaatctaccagaccgaggtctaatgggcgggaagccgggggccttcacagagctacaggacctgactagggctaatcaaagaaactctcagggagcagagaaaaatggggaagccagaagctaagaccttaggaagctttgccaataaaggtataacaatgaatagttgaaaaccactcttagcttaagggtgggacaaacatctgtcatccaggcacttaggcatgtgagacaggaggatgatgatttcagaggctagcctgagctacataacaagactgtcaaaataagacattttgtataagtctcctttgaagccagtgtgacagtgtccctgtgccaaggcaagtaagtacaaggtaaccatgcaggtccttccctctgctttccgggacatgactgttgggcacatggctgtgcagggctctctgtctgtgatctttcaaggcactgatacattatgaaacatctttctgtgccccagtgcttgtctttttaggaagaattctataagattgccttcatctgggtcatgaaaatgaatctcatgtattgggaaggcagctttctgtccctgagcaggacacagtcgtcatccgctgggcatccttaaagacaaaacccagaaacctgctcgtgttcttaggctcgactcaagccaagcctttcagttctgaagatggcacctttgctttgtttggtaggaaaggctgctcctgggtgccactattgatacagtggctctctgtgtgtgtgtgtgtgtgtgtgtgtgtgtgtgtgtgtgtgtgtatgtgtgagatcatagaaagtgcacagcaggtccagctcacatgacagctgcttcacacccccatggtcaagtcagggaagtaggggtaacctccttctttcattcagttgtctgctccccacagagtgagtatagcatgcactctgtgccctgtaaagatgaggtcccttttgcaagataaaaaaatttttttgacatttttagaaattatttatgtgatcttaaataagcatagcttagactgactgtttttcggtgggtagaacacttgtttagtgtgcatgaagccctggattccatccctagcactgtataaaccaggagtggtgtacacttataatcctaactcttgggaggtagagtcaggaaggtcagatgttcaaggccatccttggctacatagtgagctctggggattctgggacacatgagcccttgtctcaaaacaagacctagcaggcttcagtgcctctgagcagcccccttgggcgttcctttaacgactggcttctagggtgtcattcagaggggaaaatggttactccagagcacgtcagcttgccctccctcgcagaggataaaaattactaaggactgcacaaagcgtgtgtttgaatgtggctgcccaagtgggcagaggcccatcatctgtcagtccctgcagggtccctgagcttagcagagcacctgagccacgccagggtccctctcctctctgcgttttatcctgggaagcctacacactctgtagtgcagtagcccccctggtttatgcagacacctcccaactctgttagagactcagggatgtgtcagagacccatcctgggttctggccatgggtgagaaggcagtgtcatttcctaggtgcctccattccaagcagaaacactcaggctacatcagcaaaccaggaacagagtgggcctcacctttcccatgccttccaacacagctggaggaagggagtgttggcctgtggtactcacctgtgctccacccctgtagatctctgataaccagggtttagttgattttaaagcttgccagtgcttacagcagcatcaggagaaagaagaactaaacaaaaggtttagggttgttaaagaaaaatccatctctatataaaacgatcagcgcactcttagtggtcaggtgatcgaacagagtgggctctcatcttattgagcacaaagcccaaattagcgcaggactggacttctggaagtgcctggctggctcaatcacagtgaccttgaacctgcttgacacctgccacgaagccctaggctgtgatcaagtgtggtgtctgtccatccatccatcccccttgagctggaagccctccagtcaggctcagacaagaacaaggacttcaccaggaatttggggtagtcattccaaggagccctgccctttgtacccccaacctgaggcctgcgaggtaaacacaatgtggacttgcagttgagccgggcattgtgcttcggtgtgcagcatggtcttggtgactccggttctgaacccaagccccagctctgcaaagggtgtttcatgtctctcactgtcaaagcttggtggcttgaggattcaatgttttgcttcttctgggacaaacaggaggggctgtggggagtccttcccagtgaaactcactgtctctatattgtgtcccaaggaagggaggcacagctgcgtcccggcagtccgtggtgacaccgagagttcgagcacccaggcatcccagtggtattgtggaggggccgaatctctctggctttggctcttcggacaatcaatcctcttggtcttcaaagctgcccgttgttcctggggagtgggggggtgtgaatttttagcagccttctcctctctcccaaacccatttggatgggatgggttttccttctgatgattcaactccatctctaaaatgacctcctcggagattgcacacccgatgggttagggaggggcagctgcatatcctctccatgtgtccagatgggggctgcacttctgattctaatcccgccttgccttgttgggttgttattgttagtgttcctgctacagccattgtcttaatgatctgcctgcccctttccctctctgtctttcccaataacccttcctcccaggcttcctgttggttttgttcctggactttgtcgctgtccaagacttgtgattgtctggctgaccttttcttcatagcttggtccttttttgttggcgccccgcagcaccttctcggttacccgagctcaggagcctccgctcagatccaatgctaaagccatggttcacagaagcagttcccgtgcttcatttgcttgtgtgtctttctgtgcctcccgccaagcctctgcttgtggtcccagggctggctgccaccccaggtgtctgtcacccagccctcatgggacacacagctgggtcacaccaccagcaggcacgcggccaagctccccttctcttctggacaccatcactattttgtgctccgactttgtccccctgtggtgtgtttctagccgactctccacccactcctttgttttgttttttgtttttttttttcttgtttgcttcttttagtttttagttttattttaacacaaagccagatttttttttttttttaattttcaaacctaagagaaaactttcgtaagaagattcccatagttgaatcttcataacctttgagtttcctggcctctggggtctggagacttttgccaggtctctgtgggctgagctgctgcagggctgggcagtgggttgggtacctcgtctcatggttttatcttgcatgggatttgatgcacaccccccgtccctcccacaatacccacttgctttttcttttcccttgatgctcaagttatgagttaggatgaccttgacaatcatgacgtcatcttagattctctccctgctccttcattaattctctggtgcatggtcctgatactcccctgatttgctttgctccaaccttggtcatcagctgccttaacaactacatcttggagcattcaaaggacaccatcttatctcagttctagtaaaaatgggtgtcttagagaccgtgctaaagaaagctgccagcgtgcggggcagtgatgagggcgtagccagaccagactgggcctgggaactcctacttgttgttgttaaggctgctgaggacatgtcccaccacgatcatcacaggtgtctggacagtagtggagccagcttccctgagccccttttgtgtgaacagaaaagggagctgtgtgaaccttgcctgctttcaggagctaagtacctctccctgcccactcccccttcctctgggcagagcattggcaccagcttgccactgtaaagaaatacacaacaagcgtgctagaagaaggcagatctgagctctgtggtgaaaaactaaatttaagcctccttggcactccccggtcccccgagaactggatccactactggtccgagaagtctgatgaggaaccctgtctggattgggccggaagctgggatttgatgctctgcagaccagtgctcaaaaacatggttatttttgagaggccaccttcagtccagaacattggtgtctcgacttccacgcccagatccagttgacaaggtagcccatcgccactcacctgtggagggtcctgctggatattagtcccccttgtggtttataatgggttcgaggaatagtttgttctccttcttctccccatctagcgcaccaccctgggaagtgcatgtcacagaccaactcaactttcacctttaccacttgccgcatcctgcacccttcagacgagctcactcgggtcacgccaaggtaaggactgtggccccagagtgggtgggaatggggcaagtccaggacccgcctttctcacaagacctcatgatgaaggtcaggaggttcattcaaaggctgattccaagccaggtgtggtgctgcacacctttaatctctgtaggccagcctgatctacgtaatgagttccaggactacatagtgagacttttgtcaaggaaaaaaaaaagcagacaattacagacatagggacctgagtttgaataccatcactcataaaaaaaaaaaaagctaggccttgtattcacctgtggatagactccttagcgttaactggctagccagcctaacctgcttggtgagagagactatcctgtctcaaacacaaggtagataaggggcaatacctaaggttgacctctggcaccgcacgcatgtgtgcacgcatatgcatacacagatgcacacagagagccaaacccaacaggcttaagcatcttacaggcatctgtggacacctgttctgggtcccatctttctttctgaacctaggccttgtttgttcagatagggtagatgggggctgggaaacctcttttcactgccccctctgtatgtagctgtgatgtcgattctttgggttctccttagatggctgaagccaccatctccgcaggccctggggctgagttggtggtgttctctctgagcttgccaacggagagtggagttctttcacggtagagttactgagctctgtagaagcttttcatctccctggagcagactccaggaaccacacgtcacagccaaactctaatggccagtgtcaaacacagtatggcgaagccacatgcccagtgtggtggcttgtctctgtcccgtgtaccatctggaatgatgctggtctgtttgacctgatgtcagccatctggcttccctccttgccttccagggaaaagggagaatggtatcttagaacacagaagagtgacatccaccccctaccccaccccaccccacccccactttctctgtgacacagtcaaattagatcctagagttgatggatggagtcagggagggaggtgaggagggccagctcagccggggcggccacccctgggagcaccttaaactatgaataattctccacaggtcttgtgaggatgacgacgaagcagcaatatgccccgttgagctgagaggagatatagggcagagagtctgagcccacgggcaaggcagggggtgagcacacggccaatggagcctgctcctgcagggccacgcccaaggagctgtgtgtgcaactgtggctgccactaacccggggacggaggcttccatgtgtctctgtggttgtgcctggttaacatggtcctgaccattattctaacccagctaaacccccagaccagctgaatgtcaacactaatgaaggcataacagaaggtttcacccaatggggtccctggatttccgctttgtttctgtcccttgctgcccctgggagatgctggcttcccagcctgtgactttgtttagaagaggttgttttaaaaggccacagaacgttgatgtcccttgtgaagccaaataactaaatgtatgctttgggttgaagccacaggcctcagactgcccccaagtatgtcttaccccagaagtagctatgtggggggcggggcagaaagaccttggaagtcaggtgtaaggggagctacaaggggtaagggggtaggggactgtcttgcctgaggtgggaagaaatgtagctcgggtgggggtggggtggggggaagtcttaaaaatcttcataggaatggccacactcatttcccttcttgtctagaacattcataccttctagcaactctcagcatttataaaaacctttcctgcgccttttgcgagtctccccttcttatccccagatctgctgtgctctctccaggtactcccaactctgcagaatctcctctctcaagcttgtgtgtgatgagctgtttctgtggctcccaccccatgcccgccagtgttaggtggggagactacctaaatgtggggtcacatggcacctctatctctctctgtctagggagggaggggcccgtctctcatcattccaagggccttctccagatggtcccggttccctttctgtttctagttggtgcctgcccaaggtgcctgggcctcccgtgagcagcctggggagaggggtctatgactgagttctggggactgctcagctggcctattgctagggaagctgaccactccggctgaagtcccacgaggcagtggcagtaggttttcttttgtccctctgcaccctctcagaagcagagcagacctccctgaaagccagctttgtgagcacagactgctacttctccctgctgcctgcattctggtggctttcccagctggatcacagatactgggacctcccaggtctccccagtcatcaggccgtggtagatggacgaatatggcttcgctacacactctgatgggctttgaaccttacaaatcctagacagattgatcatgttagatgtggtttccttcccctgccctgaccagtccactgcatcccagtccactgcatcccaaggtgtttgcacagtgggaagtgggagcaggaacagcacggggctgaggctgaggctgaggctgagtcctgtgccttggctgcgtttttgctgttcctgtaacaagttctcccgtaactcgcggcccaggtttgaaagatcaaggtttggaaaaagaactatttggggtaatttggttgctgaagggtctgcttcctgtcatgacctgacagccgtggggccgcttcgcatgtgggttcaagtccaggattgtccactcactagccaagtacagccctgagtacgcccactgaccttagagtctgcatctccatgtacagaggagacagacggctctggggtaagcaagggaccatgcgtagcttcctgttaacttgaagcacagtaagagaccccccccccctacaaaatgaggagcagagggctccacagggcacagcagggagtgtcttctcctaccccaagctgcttctgcactccctgcaggcgactgggccactgatggttctttctcactaataaccagcccccccccccctttctttcagccttaactctgccccagctccggcttgtagcagtaccagccacttgaaatccacaccagtggccacgccatgcaccccccggagactgagcctggctgagtctttcacaaatgtccgtgagtccacgacaaccatgagcacgtccctggggctggtatggttgctgaaggagcgaggcatctcggcggccgtgtacgacccccagagttgggacagagccggcaggggctccctcctccactcctacacccctaggatggctgtgatcccgtccaccccaccaaactcccctatgcagacaccttcggcctccccgccctccttcgagttcaagtgcacgagccctccctacaacaacttcctggcttccaagccggccagctctatcctgagggaggtgagggaaaagaggcccgtgcggagcagcgagagccaaacagatgtgtctgtctccaacctcaaccttgtggacaaagtcaggaggtttggggtggccagagtggtgaactcaggacgtgcccgtatccccaccttgactgaggaacagggacctctcctctgtggacccacagggccagcacaggctcttgtccctgggggcctggtccccgagggcctgcctctggggtgccccagtggcatccgacggaatcgcagcttccccactatggtcgggtccagcgtgcagatgagagcccccgtgatcctcacctcgggcatcttgatgggtgctaagctccccaaacagactagcttgcggtgaggctggggattgctgtcctgtctgcttcctgcctcctgtccccgacagagcactcacacccctgtctcctctgaggtccactccttctgagttagagagatcaattgtgtgcctcttggggggagagtggaactccatatggtgtgtatacaggacttggggaccttgcatctgctctctcatccaatccacaggaagtaataaccctacaaggtcacaatctcgtgaggatgtcacctgagctcatttgggggaaggtggcgtcctttcttccttactttaaagaagcactgaaattcccaaggctgttcttatcccatggataggaatctggtgaattctgcataagactgtcagggtgcacacagagccgccatgtggcacaggtctcctcgctcacctatgacagccgacacacagggctgctcgccatcggagagctgtcctttcagttgtaggtgacccagcttcatcaaggtctgcactatcctgccccaatggactgtctgttctccagacttcttttcacgtctctgacttgaagttaccttgcattttgtcacaagctgtcagggttagagcctgacgcgaaaagaatgtatttacactctgatgcgcaatcaggcggcccctccgtgttctgagtgattgattttttctttttttccttcccatttctaaaatttttatttgcagggaagtctcagtactggcagtttctcttggttctgacaccaaagtgcagacggcacacacgctaactctctaatgacagagcttatttctgggacccaatgtcacagccagggtgatgtatgaccagttctcactgtaacaataggatcatggggaaggggacaggactgttaaacctatacacggtggaggggaagggccgaagtcacagcacacctcagggcatcctgagccaaggtgtgtcaagcgtgatggctgctggccccttttcactctgaagggagctcaggccacatcgtagagctctgtggtcctcagtggctgcagtttttagtcccctcatttcaaaactagaattaaatttcctcctcatcccccaagtccattgtcccctcatcccatttctgcccataggaaaagatcagaggtgcttatgagtggaagaagtgtgagcaagtgagcgtggcctgggcctgctgctgtcacctgtgcagttatgaatttttatttattatccatgtgtgctgtattttaatcagatgccgtctccgcttccagctcaagcctctgtgtgtgtgtgtgtgtgtgtgtgtgagagagagagagagagagagagagaatccagcccaggtatattatttatttacttttgtctgaggatggctgtatgtctgtgtgtcacatggtcacctgccccagacatcggtggaaggatagcatcctgtgtacaagaaattgtcacatgaacaactcccccaccctcagcaaaagatgtgtccttgaatggaggcgggtcaccttatgcccaccaaggatgctttgagaaggtccccaagcagccagcgtcagtcccacgatttcaaactatttattctccaaacagagtgctggttcatcacgttctctgctctcctggctgctgcaaatacgtgcagtcacttacactttatttgaatgtattttaaagcggtaggtagaagaggaaaggagggtgacaactttggcttggatggaccacgtcacgtgttcagaggggcctccctcccgtccacactggaagcgccagtgttaagaaccggcactttagaggtggtgataggattgttagcaaaccggtgatcaacattaagcaacactaccaaaaaaatcgtgttgtgatgcgtcaggatcagccacaagatttcattcactaacgaatatcaataaaacaagctcaaagatggaaagcttttgtctttttttagtatgtctgtgtccacctgaatgcaattgccctcagaagccagaagagggcagtggatcccctagagctggaatcaccggtcatttttagcagggtatcaggaaccaaactcaggtcctctgcaaaggcaggatgtgctcttccacctgagctatctctctagccttggtgtgtacatagcttctcatcaggaaattcacctctttaagagttgaaggcattgttttggggggcatggtaaatgaaaggtatataccccccagtctctcatccctccatcctttcccaacataatagcattccatggacaagttccctgcaggaccctgatgcactcttcagggctgtatgctgctccactgaacacaaattcaatcctgtgaacatactggtccttctatgagccagtcccctacaggcagtcacagagctgattctcatcttttatgactaaaacacagtaatcaaagccgccttgtgtaagagattccccacatgggtatgacgtcacaaagagaatcaccagagaggtagtgtcaaatttcctcccatagaatgctgctgatactcttaggaaccaagagtggtaaaggctaccagcagaagtgtgaagagggaagactaaactcactgtgctgcctctggaggtagatgctggggggagcgtggcatcatgagtgccagggatgctggcatgtggcatgagtgttggacattggggtcgtggcatgaatgtcagggacactggtgttgagcaaattgccaggttcaaccatttcgtaatgatgacctcaagcaagccactcactgtctttggaggcctccacccttttaatctgtaaggagggggcgatagctctaccacgtgagaacagagaaagcagctggtgaggggcagagtgtgttttgagtagggacagccagtgaggcagcccactggcaggtaaaggcggtgagagagaatttactttttcattgctgtgacccagtacctgacaggaagcagttaaaggtgaggagatactgttttagcttgcagctcaagagaatacaatctgtctatcacagtgggcaaggatgggggcaggagcatgggagacatctggtcacattgcactgccagacagggagggaggctgggccagcaaaccgcaaggcaaggccagccacatcgaccacttcttccagtgagccgtggcatacttaaggctcctccgaaaccgttccaaacagccagggaccgagtgttcagacagagaggagaacaaccatagaaggggtggcaggccctggtgtcaccctgggttcctctcttccttcacatactgatgcaagaggggttcaccctcagcatcccaaggttgcggaacaggaagttctctgctaagctacaacttgcagggaaagaaactgtttatgctaagtcgatgtggcttgtggatgctacaagggaccctctgagttaggaccccgcgtcttatcttaaaaacattattttctcaattctttgagaatgtcatacaatgtatcttaatcctattcactggcaacttcataactcctcccatatccacttccctctccccaccctcccaaattcacgcctcacgcccagctcaggttgtccaacccaaggacaagagtccctaaaaaggccagtaggagaatcaggaaacaaagatgtcaagttcttggctttgaactatgagggaagaaaaggctaagtacacagtttgatgtgaaaccagacctggagaggaagcttgctggaccattgcttacttgctctctctctctctctctctctctctctctctctctctctctctctttctttctttcttttcatttctctcccagtccggtgtaatcttcannnnnnnnnnnnnnnnnnnnnnnnnnnnnnnnnnnnnnnnnnnnnnnnnnnnnnnnnnnnnnnnnnnnnnnnnnnnnnnnnnnnnnnnnnnnnnnnnnnnnnnnnnnnnnnnnnnnnnnnnnnnnnnnnnnnnnnnnnnnnnnnnnnnnnnnnnnnnnnnnnnnnnnnnnnnnnnnnnnnnnnnnnnnnnnnnnnnnnnnnnnnnnnnnnnnnntgcagcagacaaggaaagggaggggttggaggttcgcaatattcattatgcatttgattccccttttctagtggtctgaattccaggttatgggaaaagcctggaatgagtcttaggagccaaggacagaggatccagttttacaggggctaggaaggaaggcgttacacagccccaccctaaggctcacttccaccacagggttacgattcccttgagcaatggggaaggagaaatggcagcagatgggtctcagcagaaaggtgtccagccgtacgtagatgtgaggactcactaccacgcacagtccgggagcaggaagggaggtgaatccaggagccttgtggatgggaccaaagagaatagcagaagcctccccttcaggtctagcagtactgcattcagagcttgataccatcttggagaaggcagacagagggaggcatcaatatgaattccccgaagcgtataaagggggttgaagaagaaaatgatgcgtgagctcctggttcgatcatagcccaagaggagtttgttttcacggccagtagagggcgctcagagataaaagaaggcctgttggcactgggccctggataagcgatcgccagatgggacttttgctcgcccctgaaaagcagttgagtgctggtttctgtctcactcttaaccccactcgggccatcacttgcaacggggctttgcttggggttaaggttgggaaaaacgcccagggagcaggcctggcttctcaggggcctctctagcgggggattggctctccctcttagaagctccatgcacccacttagcggctgcctcagactgctctgaggatccagacaggcttgagtggaggttgtgagggggcagcagacgtggtcatgaatgcagggaactgagtccctgtgcttggggcatcaggaagtcatggggctagagaggcacagcaatgaagaatagcaaaactcagcatccaatgggagaggaaacacttcacacacacatacacacacacacacacacacacacacacacacacacacacacacacacactcgataccacaccttgaccatccagaaagcatcttagggataattatgaaaatgttatgtgttattaagatgttccttcagatgggcttggacataggcccatctaatgtcagctttattaattgtcaacttgacacaacttagaatcacctgggaagagagtctcattaagggattgtctacatttgggttggcctttgggagtgtgcatgtgcgtgtgtgtgtgtgtgtgtgtgtgtgtgtgtgtgtgtgtgtgttcatgagtgtgagtgcatgtgtatcttaattaaggtagtcaatatagcatgatccaactcactgtgggcagcagcgttccctaagcaggggtcctgaaatgattaagagtggagaggataagccaggagtgcaggtgctggtctgccttatctacctcagctaggcttcattaaggccggatggttttacggacaactcatgccaggcttgctggctctctagacactacaacaggccttcctgtttctgtgttctatgttcaccttactctgctaacaaacacctttgccctctcttacagcgaaaacagagacactgcacaggagagctccctgcttcctgtgtccagactcacagactcacaagcttgctgtcagctgtctttgattttttttggttttgtttttcatgaaggaagcaggttctccttcaagattctgacccatttctgcataaattctgagggtctcctcctcccccctctcttgggacccaccttatttcaaccactgtgccttgatttccctgccctttaaaagattctttatgaagcattcaacgttaatgtaagagtaagacaacaaacaggatattcttggcattcacacaagctaagcctcttagttgtgaatgcaagaaattgactctgggtgggttagagcactgcttctcaacctgtgggtcgtgacccttccatgtcaaccctttcacgtggatcatttaagactgttgaaaacacagatattcacattatagttcattacagtgtcaaaattatagttatgcatagcaacaaaaataattttatggtgtgggggggtcaccacaacatgaggaactgcattaaagggtcacagcatcaggaagactgagaactgctgggttagagattttttttaaggtttattgaaggatagtgattacataggggagcctccctaaagtcagagaatcagacttagtggccagggaggaaggagcatgccagccgatgccatcaccaggagaccattgtccatgtggtccacactgctgacaatggagtccaccgtcataaacctatagcccacgagaggctgggggtgtggggcggcttgtatgagcctatggcttagctgcaagagaagcgtaggtggagtggggaagctcttccaaaaagaaaaacaaaacaaaacaaaacaaaacaaacaaaccctcacgcttgtcccccaaggggaggttcagggcatatgggagacactcagcctgtgttttgttccttctaaaccctgtctgggggctcagcaacctgtgggtgctttgacatgtgaaccgcaacaacacacccagcatgggaaacaaggggaccgcggttgcactgattatgaatttgctgtctccctgctacagtatgtcgttttcccctgtccccaccacaaggtgtcactgttgtgtagcagttgcatcagattgaagcctgtttattcggaggtaaaacaatagggtgtcctaaaaggaagggatataccccatcctgaagggaagctagttaggacaggaagcaaacaacttcagtgtagnnnnnnnnnnnnnnnnnnnnnnnnnnnnnnnnnnnnnnnnnnnnnnnnnnnnnnnnnnnnnnnnnnnnnnnnnnnnnnnctgtcactgttagagtgggctttggtgatgcagctgtccctgagtcatttctgctcctgtaagtaacccctcacccatattccaataagtctcattggttcgccaagctggactttggctctcccatactactgtttgtttgtgagcccatgtggttgctgactcctccttgagtcgggtgctcttacccactgagccatctcaccagcccggttccctatcttctatctgaggttagtggacatttatttgttcatatcgctccaggagtagtatcaaacaacagtggccacagccctccttgcaggaatagcatccaggcagcactctccttggagcgcttctcaagacagctacatcacccatctcagttttatcaactccacacctcttcccaaatcctgcagaagagagattctctgattcctgccacaggtacagaacccatgttctctagctaggggagcgtctcagtgcttgcctgtgtgtgtgtgtgtgtgtgtgtgtgtgtgtgtgtgtgtggtcctagatttaatccccagggtggcaataatcaaatcccaactctgtacattccatcttttgaaaacagagccttgttaactggttagcggttatgacttaatttctctgccaccggggtcacacccacctctttgtctttagctgacctgatctctttccttgttgggagtagaacaattttcatttcaaaaagagctgagccacatgcacgtcccagcatgatacagatgcacagtgaagcccaggagtcagggctgcagacccgaagcctcctcggaagcaaggacactggtgggctgccatcctgcaaggtggcaagtctgcaagcagtgcagagcaagcaattaaaaaaaaaattattaaaaccccgtatgtgacgacctgaagagatggctcagcagttaagagcactgaatgcttgtccagaggtcctggattcaattcccagcaaccacaccgtgactcaaaaccatctgcaatgggatctgatgccctcttctggtgtgtgtgaagacagctactgtgtactcatatatatataataaataaataaatctttaaaaaagaaaccccacatgtatggcatgtgcatacgtgtatgcacattcacaagtgtgtgagtgtgtgtgcagtagtgtgtatgcgcacatgtagaggccagaggttggtgtcagacttatcctccatcgcttttaaaccttattccttgaggcagggcctatcaagccaacccagagctcatcgatgtggctggtctcaatagtgagctttgggatcccctgtgtcaccttcagaggctgaaactctgccgaccaggaacttacgtgggttctgaggattcagattctgtccttagacttcccagtaagtacttaaaccactgagccgactttgcaccctacagggtaggttctgaacacatcttatagtcaattcaacaagatctgtcaacagtttaggtggcagatgtggagaataatcagacgccaaggatcaggatgcctaaagcacctgcggggacgatggagttgcctcctgtagagcagggggtagtcaggagctcaagttggcacgtgctgtgtttacatgtccccagaggcaggcatccagatggaaccagtctacctctctgcctctgaacttgacttgtcgcccaagacagagaaagctggggcactaagcctctgtctcacacattgtatcctagtgtgcgcctgcaccaggtcaacccaggaaatccttctctgttgttgttgttgtgtatgtaatacacatgtgtattacatgttaaagcatgatcacatgcatgtagaggccagagatcaatgtagatgtcttcttcaaccaatctccaccttatacttaggcacagggtttctttgctgacgctgaagctcaccagctcgctagactgactgcagagtgagctgtgggatctctctggctccatcctcagaacactgaggttagactcttgctgtcatgctcagcttttatatgggagctgaggatttgaactcagtccctcatccttgtaagacaggccctagacccccagaccagtaaatagcatttgagtaaataggtgggaagaataaataacagcctcagaaggttgccattcaggccaaaggtcacagtgcccagcttccacctcaggtttctttcccagacagaggctgacaatagctgtgttgtctgtctgctatggccagtgtggactgtaaacctggctcattctttcattcattgtaaatgaaatctttcttcctggatgtagagaaagccccagagactcaggagccttgcacactcctggactcagctgtgggctcgttcaggtggaagatggggctttaagaaggtctgagtggcgcatgcctttaatcccagcacttgggaggcagaggcaggtggatttctgagtttgaggtcagcctggtctacaaagtgagttccaggacagccagggctatatacagaaaccctgtcttgaaaaaccaaaaagaagaaaaaagaaaaaagactccagggacaggcgtgtgcagtgtgtgttttatgtgtggacatgatgtgcatgtgtgcttgtatgcttgagagtgtgagtttgagtgcatgtgtgtgtgtgtgcttatgtgtgtgcctgtgtgtgtatgtgttactcctatcccttaggaaatctggatcagactctgggacagtttcccagagttcctctctgctcaagtcccaatccaggtaatcaagaagttcctgctgtatagatggaacaacaatatgaactaaccagtaccccagagctcttgtctctagctgcatatgtatcaaaagatggcctagtcggccatcactggaaagagaggcccattggacttgcaaactttatatgccccagtacaggggaacgccagggccaaaaaggggtaggggagttggggggggggtatgggggacttttgggaaatgtgaatgaggaaaatacctaataaaatttttttttaaaaagttcctgctgggtgcttgtgacagccagctgtgtcattttcctactgtccagaacactaccgaacctactacagaaggaggatcccgagcacttaagacttaccctgttcaagttttctttctgttggggtgaaagacaacgtgacctaagccacttggggaggaaagggtctgtttaacgttacagtccaccactgagggatgccgagacaggaggctggagacaggacctgaagcagataggggaaacactgcttactggatccctctatggcttgctttgttatatagaccagaagtacccactcagggctggcaccacccacagtggactgggctctcttacatcagtcctcagtcaaaagcctcccagactgcccacagtccaatctcatgactgatgctccctcctccatggcgactctaggtttgtgtgaggttgacacctaaagttgactatgaagcaccttaattctgccggttcaggctctgcccctggtgttacttcttccaaggagactttgtagacatcccgggctgtggttgtggttacagctccctgtgagacagggcaaaggtgaaggtgggagcagccagcttgccagcagcaaattctccagtttttatgctctaaacacaaccgtggatgcgctgggcagaacttaacattttcacttttctggaattgtttttccttccacttttcctctactcagatctggaaggcagaggaagctggctcgctaattagaagtaaccatggttaccaagttgtctttaaaatatcttgaagagttgtttggatttttgcccccccccttttggttttaattatacagaaagcattttatttgacagccatctttattttctttctggtgattgggtggtcttccgaattcattccttttggtggtcactttaaaagctcagggacagaatgaaaaatcactcattaaaaatataattccgcaaccttataagataatttaatcatctcaaattttcagttggttgaataacaaaggaggaaaagtcctacagatttcaacatggcctcacagagagacttcagcaacctgaacagaatgcgtaagcacccactgggggctcatgggtaagttactgtgcctgaagcttccccatcagggatatggttcacgcagcagttgctggatactgcattggtcactgtcttagtccgcgttctactgctatgaagagacaccgtgaccacaacaactcttaggaaagaaagttttcattgtgacttgcctacagtttcagaggttcagctcattttcatcatggtgggggagcgtgaccgctcacaggcagactccgtagctgggagttcttcatctgggtaagcaggcagcaggaaagagcaagacacggggcctggcttgagcttttgaaaccccaaagcccactccagtgacacattttctccaataaggccacacctcctaatagtgtcattccccatgatcaagaattcatatgtaagggcccatgggggccgtttctattcaaaccaccacagtcgcttctcagtgctgaatgcctgataagttgctgagtacaagaagaagacaggtgatcgtctgttgcagtgaagaaagcaaggtggtggagggggttagcgggctggtggctctcatcctggtggagcaaggaaggggtatgtagtgcctgactggcttccttcttcctctcttactcagcctggaatcccagtgcatgtgcgaataccacaacattcagggtaggttctcttcaacgttaagttaatactctttggaaagtccttttattaatattgtcatcattatcatcatttaagcttgtctatagataattttgcacatgtgcacaatgtttgccagtcactctcactcccccactg

SEQ ID NO: 2463 - DNA, 624 bp, Mus musculus
cgggtggccctgtgcacacccgtccactcctgccaagccagggcatgtctgcgaccctggctggagcccagcatgtgcgctttgggccccgatggctcctctgggcaggtggccaaaggctctcccaaggacagtcccttaggacaatgtttcaaatttggggcgacttcaacaatgtccctgagagacgtgggaggggaagaggaatgttttgaatacaactaccaggatgaagagaaggcggccatccccgagcagcatgataccctggacatcttggcagccacccatgagcagaacgataccatggacattttggaggatgttctatgtgccgaaagagttggccagatgactaaaacatacaatgacattgatgctgtcacgaggcttcttgaggagaaagagcgggatttggagctggctgcgaggatcggtcagtcattgttgaagaagaacaagaccctaactgagaggaatgaactgctggaagagcaggtggagcacatccgggaggaggtgtctcagctccgacatgagctgtccatgaaagacgagctgcttcaattctacaccagtgccgctgaggagagcgagcctgagtccgtctgctcaaccccgtaa

SEQ ID NO: 2464 - protein, 181 aa, Mus musculus
MCALGPDGSSGQVAKGSPKDSPLGQCFKFGATSTMSLRDVGGEEECFEYNYQDEEKAAIPEQHDTLDILAATHEQNDTMDIDVLCAERVGQMTKTYNDIDAVTRLLEEKERDLELAARIGQSLLKKNKTLTERNELLEEQVEHIREEVSQLRHELSMKDELLQFYTSAAEESEPESVCSTP

SEQ ID NO: 2465 - DNA, 5167 bp, Mus musculus
cccggggcccactcggcccccgcccccgcgcgcccccggcccgtgacacgcgcgtgaagagccccggagcatcccggatcgccgggcacccgcctacgctgagcctcgcagtcccgggaacgtgagccactggcggccggggccgggccgacaacgaatcggagcagcgacaccggccccgggaccgcgcccgccgcccccgcgcctcctgcggattctctgtgagccgcaccttctggtacactgaatctcccggggggccatccgcccgactgcccctgactccggcagcggggaccccccatggcagtgggcacctccccttgaaacctgccaagctggacgccacagccctgcacgacgacacctcggccagctccacgcccatctctgaggcttgcagccatgcggtcctcgcctgcggcccgggcatccctgaagagtactatgtgagcgaggctgtggaagatgctcccagctacagagagcaccgggatgcctgcaccatcaccgacgtgtgcaacagcaccaaccttccagaagttgagatcattagcctgctggaggaacagctgccccattacaagctaagagcggacaccatctatggttacgaccacgatgactggctgcatacgcccctcatctccccagatgccaacatcgacctcacaactgagcagatcgaagagacgctgaaatacttccttctatgtgccgaaagagttggccagatgactaaaacatacaatgacattgatgctgtcacgaggcttcttgaggagaaagagcgggatttggagctggctgcgaggatcggtcagtcattgttgaagaagaacaagaccctaactgagaggaatgaactgctggaagagcaggtggagcacatccgggaggaggtgtctcagctccgacatgagctgtccatgaaagacgagctgcttcaattctacaccagtgccgctgaggagagcgagcctgagtccgtctgctcaaccccgctgaagaggaacgagtcctcctcctccgtccagaattacttccacctggactctcttcagaagaagctcaaggacctcgaagaggagaacgttgtacttcgatccgaggcctgtcagttgaagacagagaccatcacctatgaggagaaggagcagcagctggtgaacgactgcgtgaaggagctgagggatgccaacgtccagattgcgagcatctctgaggagctggctaagaagacggaagatgccgcccgccagcaggaggagatcacccacctgctgtcgcaaatcgtggacttacagaagaaggcaaaatcttgcgcggtggaaaatgaagagcttgtccagcacctgggcgctgccaaggacgcccagcgtcaactcacagccgagctccgagagctggaggataagtacgcggagtgcatggagatgcttcatgaggctcaggaggagttgaagaacctgcggaacaagacgatgcccacgtcccggcgctaccactctctgggcctgttccccatggactcgttggctgcagaaatcgagggaactatgcgcaaggagctgcagctggaagagctggagtctccagacatcacccaccagaagcgtgtcttcgagacggtgaggaacgtcaatcaagtggtcaagcagagatcactaaccccttctcccatgaacatcccgggctccaaccagtcctcagccatgaactccctcctgtccagctgcgtcagcacccctcgctccagcttctacggcagcgacgtcagcaacgtggtcctcgataacaaaaccaacagcatcctcctggagaccgaggcagccgacctggggaacgaggaccacaataagaagccgggcactccaggcacgccaggctcccatgacctggagacggcacttaggcggctatccctacgccgggagaactacctgtctgagcggaggttcttcgaggaggagcaggagaggaagctgcgagagctggctgagaagggggagctgcacagtggctcgctcacgcccaccgagagcatcatgtccctgggaacacactcacgcttctccgagttcacgggcttctctggcatgtccttcagcagccgctcctacctgcccgagaagctgcagatcgtgaagccactcgaaggttcagccacgcttcaccactggcagcaattggcccagcctcatcttgggggcatcctggacccccgtcctggtgtggtcaccaagggcttccggactttggatgttgacctggatgaagtgtactgccttaacgactttgaggaagatgacacaggtgaccacatttctctggcgggcctagctacctccacgccaattcagcacccggagacctcagcgcaccaccctgggaagtgcatgtcacagaccaactcaactttcacctttaccacttgccgcatcctgcacccttcagacgagctcactcgggtcacgccaagccttaactctgccccagctccggcttgtagcagtaccagccacttgaaatccacaccagtggccacgccatgcaccccccggagactgagcctggctgagtctttcacaaatgtccgtgagtccacgacaaccatgagcacgtccctggggctggtatggttgctgaaggagcgaggcatctcggcggccgtgtacgacccccagagttgggacagagccggcaggggctccctcctccactcctacacccctaggatggctgtgatcccgtccaccccaccaaactcccctatgcagacaccttcggcctccccgccctccttcgagttcaagtgcacgagccctccctacaacaacttcctggcttccaagccggccagctctatcctgagggaggtgagggaaaagaggcccgtgcggagcagcgagagccaaacagatgtgtctgtctccaacctcaaccttgtggacaaagtcaggaggtttggggtggccagagtggtgaactcaggacgtgcccgtatccccaccttgactgaggaacagggacctctcctctgtggacccacagggccagcacaggctcttgtccctgggggcctggtccccgagggcctgcctctggggtgccccagtggcatccgacggaatcgcagcttccccactatggtcgggtccagcgtgcagatgagagcccccgtgatcctcacctcgggcatcttgatgggtgctaagctccccaaacagactagcttgcggtgaggctggggattgctgtcctgtctgcttcctgcctcctgtccccgacagagcactcacacccctgtctcctctgaggtccactccttctgagttagagagatcaattgtgtgcctcttggggggagagtggaactccatatggtgtgtatacaggacttggggaccttgcatctgctctctcatccaatccacaggaagtaataaccctacaaggtcacaatctcgtgaggatgtcacctgagctcatttgggggaaggtggcgtcctttcttccttactttaaagaagcactgaaattcccaaggctgttcttatcccatggataggaatctggtgaattctgcataagactgtcagggtgcacacagagccgccatgtggcacaggtctcctcgctcacctatgacagccgacacacagggctgctcgccatcggagagctgtcctttcagttgtaggtgacccagcttcatcaaggtctgcactatcctgccccaatggactgtctgttctccagacttcttttcacgtctctgacttgaagttaccttgcattttgtcacaagctgtcagggttagagcctgacgcgaaaagaatgtatttacactctgatgcgcaatcaggcggcccctccgtgttctgagtgattgattttttctttttttccttcccatttctaaaatttttatttgcagggaagtctcagtactggcagtttctcttggttctgacaccaaagtgcagacggcacacacgctaactctctaatgacagagcttatttctgggacccaatgtcacagccagggtgatgtatgaccagttctcactgtaacaataggatcatggggaaggggacaggactgttaaacctatacacggtggaggggaagggccgaagtcacagcacacctcagggcatcctgagccaaggtgtgtcaagcgtgatggctgctggccccttttcactctgaagggagctcaggccacatcgtagagctctgtggtcctcagtggctgcagtttttagtcccctcatttcaaaactagaattaaatttcctcctcatcccccaagtccattgtcccctcatcccatttctgcccataggaaaagatcagaggtgcttatgagtggaagaagtgtgagcaagtgagcgtggcctgggcctgctgctgtcacctgtgcagttatgaatttttatttattatccatgtgtgctgtattttaatcagatgccgtctccgcttccagctcaagcctctgtgtgtgtgtgtgtgtgtgtgtgtgagagagagagagagagagagagagaatccagcccaggtatattatttatttacttttgtctgaggatggctgtatgtctgtgtgtcacatggtcacctgccccagacatcggtggaaggatagcatcctgtgtacaagaaattgtcacatgaacaactcccccaccctcagcaaaagatgtgtccttgaatggaggcgggtcaccttatgcccaccaaggatgctttgagaaggtccccaagcagccagcgtcagtcccacgatttcaaactatttattctccaaacagagtgctggttcatcacgttctctgctctcctggctgctgcaaatacgtgcagtcacttacactttatttgaatgtattttaaagcggtaggtagaagaggaaaggagggtgacaactttggcttggatggaccacgtcacgtgttcagaggggcctccctcccgtccacactggaagcgccagtgttaagaaccggcactttagaggtggtgataggattgttagcaaaccggtgatcaacattaagcaacactaccaaaaaaatcgtgttgtgatgcgtcaggatcagccacaagatttcattcactaacgaatatcaataaaacaagctcaaagatggaaa

SEQ ID NO: 2466 - protein, 1033 aa, Mus musculus
ATGGRGRADNESEQRHRPRDRARRPRASCGFSVSRTFWYTESPGGPSARLPLTPAAGTPHGSGHLPLKPAKLDATALHDDTSASSTPISEACSHAVLACGPGIPEEYYVSEAVEDAPSYREHRDACTITDVCNSTNLPEVEIISLLEEQLPHYKLRADTIYGYDHDDWLHTPLISPDANIDLTTEQIEETLKYFLLCAERVGQMTKTYNDIDAVTRLLEEKERDLELAARIGQSLLKKNKTLTERNELLEEQVEHIREEVSQLRHELSMKDELLQFYTSAAEESEPESVCSTPLKRNESSSSVQNYFHLDSLQKKLKDLEEENVVLRSEACQLKTETITYEEKEQQLVNDCVKELRDANVQIASISEELAKKTEDAARQQEEITHLLSQIVDLQKKAKSCAVENEELVQHLGAAKDAQRQLTAELRELEDKYAECMEMLHEAQEELKNLRNKTMPTSRRYHSLGLFPMDSLAAEIEGTMRKELQLEELESPDITHQKRVFETVRNVNQVVKQRSLTPSPMNIPGSNQSSAMNSLLSSCVSTPRSSFYGSDVSNVVLDNKTNSILLETEAADLGNEDHNKKPGTPGTPGSHDLETALRRLSLRRENYLSRFFEEEQERKLRELAEKGELHSGSLTPTESIMSLGTHSRFSEFTGFSGMSFSSRSYLPEKLQIVKPLEGSATLHHWQQLAQPHLGGILDPRPGVVTKGFRTLDVDLDEVYCLNDFEEDDTGDHLAGLATSTPIQHPETSAHHPGKCMSQTNSTFTFTTCRILHPSDELTRVTPSLNSAPAPACSSTSHLKSTPVATPCTPRRLSLAESFTNVRESTTTMSTSLGLVWLLKERGISAAVYDPQSWDRAGRGSLLHSYTPRMAVIPSTPPNSPMQTPSDPSFEFKCTSPPYNNFLASKPASSILREVREKRPVRSSESQTDVSVSNLNLVDKVRRFGVARVVNSGRARIPTLTEEQGPLLCGPTGPAQALVPGGLVPEGLPLGCPSGIRRNRSFPTMVGSSVQMRAPVILTSGILMGAKLPKQTSLR

SEQ ID NO: 2467 - DNA, 4731 bp, Mus musculus
atggcattggcaattcagctcaggcagccctccagggcccaacctctgccaggactcagccacacactggctgggacagactcatgtgacgtgtgcaacagcaccaaccttccagaagttgagatcattagcctgctggaggaacagctgccccattacaagctaagagcggacaccatctatggttacgaccacgatgactggctgcatacgcccctcatctccccagatgccaacatcgacctcacaactgagcagatcgaagagacgctgaaatacttccttctatgtgccgaaagagttggccagatgactaaaacatacaatgacattgatgctgtcacgaggcttcttgaggagaaagagcgggatttggagctggctgcgaggatcggtcagtcattgttgaagaagaacaagaccctaactgagaggaatgaactgctggaagagcaggtggagcacatccgggaggaggtgtctcagctccgacatgagctgtccatgaaagacgagctgcttcaattctacaccagtgccgctgaggagagcgagcctgagtccgtctgctcaaccccgctgaagaggaacgagtcctcctcctccgtccagaattacttccacctggactctcttcagaagaagctcaaggacctcgaagaggagaacgttgtacttcgatccgaggcctgtcagttgaagacagagaccatcacctatgaggagaaggagcagcagctggtgaacgactgcgtgaaggagctgagggatgccaacgtccagattgcgagcatctctgaggagctggctaagaagacggaagatgccgcccgccagcaggaggagatcacccacctgctgtcgcaaatcgtggacttacagaagaaggcaaaatcttgcgcggtggaaaatgaagagcttgtccagcacctgggcgctgccaaggacgcccagcgtcaactcacagccgagctccgagagctggaggataagtacgcggagtgcatggagatgcttcatgaggctcaggaggagttgaagaacctgcggaacaagacgatgcccacgtcccggcgctaccactctctgggcctgttccccatggactcgttggctgcagaaatcgagggaactatgcgcaaggagctgcagctggaagagctggagtctccagacatcacccaccagaagcgtgtcttcgagacggtgaggaacgtcaatcaagtggtcaagcagagatcactaaccccttctcccatgaacatcccgggctccaaccagtcctcagccatgaactccctcctgtccagctgcgtcagcacccctcgctccagcttctacggcagcgacgtcagcaacgtggtcctcgataacaaaaccaacagcatcctcctggagaccgaggcagccgacctggggaacgaggaccacaataagaagccgggcactccaggcacgccaggctcccatgacctggagacggcacttaggcggctatccctacgccgggagaactacctgtctgagcggaggttcttcgaggaggagcaggagaggaagctgcgagagctggctgagaagggggagctgcacagtggctcgctcacgcccaccgagagcatcatgtccctgggaacacactcacgcttctccgagttcacgggcttctctggcatgtccttcagcagccgctcctacctgcccgagaagctgcagatcgtgaagccactcgaaggttcagccacgcttcaccactggcagcaattggcccagcctcatcttgggggcatcctggacccccgtcctggtgtggtcaccaagggcttccggactttggatgttgacctggatgaagtgtactgccttaacgactttgaggaagatgacacaggtgaccacatttctctggcgggcctagctacctccacgccaattcagcacccggagacctcagcgcaccaccctgggaagtgcatgtcacagaccaactcaactttcacctttaccacttgccgcatcctgcacccttcagacgagctcactcgggtcacgccaagccttaactctgccccagctccggcttgtagcagtaccagccacttgaaatccacaccagtggccacgccatgcaccccccggagactgagcctggctgagtctttcacaaatgtccgtgagtccacgacaaccatgagcacgtccctggggctggtatggttgctgaaggagcgaggcatctcggcggccgtgtacgacccccagagttgggacagagccggcaggggctccctcctccactcctacacccctaggatggctgtgatcccgtccaccccaccaaactcccctatgcagacaccttcggcctccccgccctccttcgagttcaagtgcacgagccctccctacaacaacttcctggcttccaagccggccagctctatcctgagggaggtgagggaaaagaggcccgtgcggagcagcgagagccaaacagatgtgtctgtctccaacctcaaccttgtggacaaagtcaggaggtttggggtggccagagtggtgaactcaggacgtgcccgtatccccaccttgactgaggaacagggacctctcctctgtggacccacagggccagcacaggctcttgtccctgggggcctggtccccgagggcctgcctctggggtgccccagtggcatccgacggaatcgcagcttccccactatggtcgggtccagcgtgcagatgagagcccccgtgatcctcacctcgggcatcttgatgggtgctaagctccccaaacagactagcttgcggtgaggctggggattgctgtcctgtctgcttcctgcctcctgtccccgacagagcactcacacccctgtctcctctgaggtccactccttctgagttagagagatcaattgtgtgcctcttggggggagagtggaactccatatggtgtgtatacaggacttggggaccttgcatctgctctctcatccaatccacaggaagtaataaccctacaaggtcacaatctcgtgaggatgtcacctgagctcatttgggggaaggtggcgtcctttcttccttactttaaagaagcactgaaattcccaaggctgttcttatcccatggataggaatctggtgaattctgcataagactgtcagggtgcacacagagccgccatgtggcacaggtctcctcgctcacctatgacagccgacacacagggctgctcgccatcggagagctgtcctttcagttgtaggtgacccagcttcatcaaggtctgcactatcctgccccaatggactgtctgttctccagacttcttttcacgtctctgacttgaagttaccttgcattttgtcacaagctgtcagggttagagcctgacgcgaaaagaatgtatttacactctgatgcgcaatcaggcggcccctccgtgttctgagtgattgattttttctttttttccttcccatttctaaaatttttatttgcagggaagtctcagtactggcagtttctcttggttctgacaccaaagtgcagacggcacacacgctaactctctaatgacagagcttatttctgggacccaatgtcacagccagggtgatgtatgaccagttctcactgtaacaataggatcatggggaaggggacaggactgttaaacctatacacggtggaggggaagggccgaagtcacagcacacctcagggcatcctgagccaaggtgtgtcaagcgtgatggctgctggccccttttcactctgaagggagctcaggccacatcgtagagctctgtggtcctcagtggctgcagtttttagtcccctcatttcaaaactagaattaaatttcctcctcatcccccaagtccattgtcccctcatcccatttctgcccataggaaaagatcagaggtgcttatgagtggaagaagtgtgagcaagtgagcgtggcctgggcctgctgctgtcacctgtgcagttatgaatttttatttattatccatgtgtgctgtattttaatcagatgccgtctccgcttccagctcaagcctctgtgtgtgtgtgtgtgtgtgtgtgtgagagagagagagagagagagagagaatccagcccaggtatattatttatttacttttgtctgaggatggctgtatgtctgtgtgtcacatggtcacctgccccagacatcggtggaaggatagcatcctgtgtacaagaaattgtcacatgaacaactcccccaccctcagcaaaagatgtgtccttgaatggaggcgggtcaccttatgcccaccaaggatgctttgagaaggtccccaagcagccagcgtcagtcccacgatttcaaactatttattctccaaacagagtgctggttcatcacgttctctgctctcctggctgctgcaaatacgtgcagtcacttacactttatttgaatgtattttaaagcggtaggtagaagaggaaaggagggtgacaactttggcttggatggaccacgtcacgtgttcagaggggcctccctcccgtccacactggaagcgccagtgttaagaaccggcactttagaggtggtgataggattgttagcaaaccggtgatcaacattaagcaacactaccaaaaaaatcgtgttgtgatgcgtcaggatcagccacaagatttcattcactaacgaatatcaataaaacaagctc

SEQ ID NO: 2468 - protein, 931 aa, Mus musculus
MAIQLRQPSRAQPLPGLSHTLAGTDSCDVCNSTNLPEVEIISLLEEQLPHYKLRADTIYGYDHDDWLHTPLISPDANIDLTTEQIEETLKYFLLCAERVGQMTKTYNDIDAVTRLLEEKERDLELAARIGQSLLKKNKTLTERNELLEEQVEHIREEVSQLRHELSMKDELLQFYTSAAEESEPESVCSTPLKRNESSSSVQNYFHLDSLQKKLKDLEEENVVLRSEACQLKTETITYEEKEQQLVNDCVKELRDANVQIASISEELAKKTEDAARQQEEITHLLSQIVDLQKKAKSCAVENEELVQHLGAAKDAQRQLTAELRELEDKYAECMEMLHEAQEELKNLRNKTMPTSRRYHSLGLFPMDSLAAEIEGTMRKELQLEELESPDITHQKRVFETVRNVNQVVKQRSLTPSPMNIPGSNQSSAMNSLLSSCVSTPRSSFYGSDVSNVVLDNKTNSILLETEAADLGNEDHNKKPGTPGTPGSHDLETALRRLSLRRENYLSRFFEEEQERKLRELAEKGELHSGSLTPTESIMSLGTHSRFSEFTGFSGMSFSSRSYLPEKLQIVKPLEGSATLHHWQQLAQPHLGGILDPRPGVVTKGFRTLDVDLDEVYCLNDFEEDDTGDHLAGLATSTPIQHPETSAHHPGKCMSQTNSTFTFTTCRILHPSDELTRVTPSLNSAPAPACSSTSHLKSTPVATPCTPRRLSLAESFTNVRESTTTMSTSLGLVWLLKERGISAAVYDPQSWDRAGRGSLLHSYTPRMAVIPSTPPNSPMQTPSDPSFEFKCTSPPYNNFLASKPASSILREVREKRPVRSSESQTDVSVSNLNLVDKVRRFGVARVVNSGRARIPTLTEEQGPLLCGPTGPAQALVPGGLVPEGLPLGCPSGIRRNRSFPTMVGSSVQMRAPVILTSGILMGAKLPKQTSLR

SEQ ID NO: 2469 - DNA, 158836 bp, Homo sapiens
  misc_feature (1)...(158836): n = A, C, G or T/U
ttggctatttgggctttttgttgtttttgttgttccaaatgaattttagaatagtttttttctaattatgtgaagaatatccttgggagttttacaggaataacactgaatctgtaaattgctttgggcagtatggttattttaattatattgattcttcctatccatgagcatggaaagtgtttctttttttctttttacctcgaggcagagtcttgctctgtcatccacactggagtgcagtggcatgatctaggctcactgcaacctctgcctcctgggttcaagcaattcttttgcctcagcctcccaagtagctgggattacagatgtgtgccaccatgcccagctaatttttgtatttttagcagagacagcgtttcaccatgttggccaggctggccttgaactcctgacctcaagtgacccacccactttggcctcccgaagtgttgggatacaggcgtgagccaccatgcctggactgtttttccatttgtttgtgtcatctctgatttctttcagcaatgtttcataattctcattgtagagatctttcacctccctggttagctgtattcctaggtattttgttctttttgtggctattgtgaatgggactgagttcttaatttggctttcaacttggacattattggcgtatagaaatgatactgatttttgtacattgattttgtgtcctgaaactttactgagagtatttgtcagaactaggagcctttggacagagactgtggggtgttctaagtatagaatgttattgtctgtgaagagagagagcgtctcagacttttatccagtttcagacctaccatcccaggcctggcagccacccactttcgttgtgtctacttcttccgcagtttgacaagtgggtggtggcaccacgttttgtagacgaaagaaatttcagaacttggccagaggctgctgtcagtaggtaatggttgaggtgggactaaatccaggcctgtctggtatgttagatctaaatctgaccttctggggcaaagggtctgagtggctgtgaggtgactctggtttgccttcccactaagctggggtaacatgggggctccagagacagtttatgccttcagaatcaaaggcccctgtgggaggcaaatctaaactcatcccctcaagatttctacccactagttattcagtcaagcacggatctagatacttctgtaaagggactgtgccgtgcagatggaattagaactattaatcccttgaccttaagatagggagattgtcctggatgatctaagtgggcaccgtgttttgagcctgtaaaaacagaaaaggaaggcagaagaggaggttagaaagatgaggcagaggccaggcacggtggcttatgcctgtaatcccagcactttgggaggctgaggcaggcggatcatgaggtcaggagatcgagaccatcctggctaacacagtgaaaccccatctctactaaaaatacaaaaaattagccgggtgtggtggcgggtgcctgtagtcccagctactcgggagcctgaggcaggagaatggtgtgaacctgggaggcggagcttgcagtgagccaagatcaggcccctgcactccagcctgggagacagagggagattccatctcaaaaaaaaaaaaaaaaaaaagaaagaaagaaagaaagaaagatgaggcagaaggggaagtcatggaattccaagtgtgaaaaggattccatatgctgtcattggctctggaatgtgggtgggagccacttgcaaaatctggagagaagcctccaggagctcatggaaagcataaggaacacaggaacaaaggctagtgcccagctgacggccagcaggaaacagggacttcagtcctacaaccacaaggaactgaattagaccggcaacctgaataagtgtggatatcagttctttcccagagcccccagtaatggactcacacctgtgacaccttgattggagcctgttgagatgcatgctggatttccaatatatggaactgtgatcggataaatggctattatttcaagccactcaatttgtggtaatttgttacagtagtaatagaacactgacataatcccggagaacaattagtccctttttgaaaacttttgccatacttggacctgcttgtttagaattgctgagtaaaatcccttggtatatcagatgcctctgcccagaaagaggaaaccttgaaagctcaggtacctggctggccatggaggggatcacccaggactagcttctccttgtcaccttttgggcttcaacctggtgctctggttctcattttctccttacaatctctgagtttgtcgtgaaggaagctccttcttcttttttttttttttttgttttgagatagagtcttgctgtcttgcccaggctggagtacaatggtgcagtctcggcttactgcaacctctgccttcgggttcaagcaattctcctgcctcaacctcccgagtagctgggactacaggcgctcaccaccatgcctggcaatttttttgtatctttagtagagatggggttttgccatgtaggtcaggctggtctcaaactcctgacctcaggtgatccgccctcctcggcctcctaaagtgctaggattacaggcgtgagccactgcgccctgctggaagctcctttttttttgttgtttttttaaccccttgcaaaatcagtgatttattgtttacaaagggcagctctgtctgctcgtgatctcctactggaagttacctgtgtgtgggtgagaatagtttcacaatcattgcaccagggagtggagaaggacttaccagggtgcacaaatccttctgcatttccacctgccctcttttgtacttcctggagtggtatagctggaaggcagtgtgttgaaggttgctcgatcccttccttgtccagatgaggggtctgaggcccagggacataacacagtttcctcagtgtcacacagctttgagttttagttaaggttctgagtcacagaaatgacatcggttgagggtagcggggagaaaatattaggaacttgcacacgtgtattttgtcagcaaatttgagttcagtagcaaactggcataacgttgaacaaccgtgcgttaagtactcttgacaaactgggggccggaattgttgatcattgagttgagaagagtggggcaggggacctgggccacccaccccaggctcagcttccatgtatactttatcctactactattcctggcacctcttttgctgaaaaattgacctggttgcagaatttctcactcctctgctaagaaaaatcctgccttcctgcagctctctaggcagaattcagtaaactaaacagaggcgctttcatctctcagggccatgccatccactctcacttttcttaagccttgtttgtttcctctgcctgaaagaagccttttgcctggtgtgccagggtttgctggagccagagaacatccagggcagtggatgctttgttcctgagcccctgtgaaacctcagaaatgcctgtttacattagagtgaagttaggctggcaccttggggaaagattgtcacctttgccctacaaattcctgggtgtccccagagggcacatgctgtgactcattcttcaagctagaaagtgggtggaggccttacaaaccagcttttgagtagtctgtaaatgaggtctcctgatccttgaattgtatctgggtcattttacatgtttgactattaaactactctttttttttgagataggatctcactgtgtcacccaggctggggtggagtggcacaatcatggctctctacagcctcaacttcctgggttcaggtggtcctcccacctcaacctccctagtagcagggaccacagacacatgccaccaatcctggtcaattttttgtatttttttgtagagttagggttccaccatgttgcccaggctgctcttgaactcctgggctcaggccatccacccgcctgggcctcccaaagtgctaggattatggtgtgagccactgggcctggccactgtgagccacatttgatgtatattggtctgtgttgaaaatgaagtaaggttaaactcgagccagcctagagagcccatgggctgtggtctgcatacttggaacacttaggagtccctcaggtggttttcattgatttctgttagtcctcaaggttagcagtgtgaaatttgggagtttagaccctttggttccagtataaatgatagaacctgggctttaaagcttcaggggatcctcagagtcatttgcaccaaaccccttctttcatttgttgttatttattctacagacatttacttagtacctaatatgtgccaacaccggtccatgctttcaaggagcacacaattttttgggggagatcagccctggacaaatggtggtcaatggacaatgcatgaagcttgtgtctgagatagagaggcattccccaaaatgtactccatgaaacaaatgccatgtagataggtatgtggagaaaggatccatagtaaagtaggtttggaaatgctggcatatgaatactatagtagaaccaagaaaggtgccagattctgagaatctggaaattataatgttaatgacagtaattattttgagaatctaatttgtactagacacagaggtaagtgccttatatggataagtgccttacattttacagaattcagtagtttggatgtgccataatttataactgtttttctacgaatagaaatttggttgttttccacttgaatttactgggtgaaagcttagttttgtcatttcaagaggggcctctcaggcttctgaatagctttgccagttgctgtacatgtaaaatgttctttggatttcagaactgtggcttgtgtttcccttttgagtcttgagtgaggtgagcatttgctgatgtctccaaattttgtttttttcaggaagtgcttatacttaaaatatttcttttgtagcagtatgtttctgggttaagtgtctggcagctataaatggaaacatcgatactaggaggagaaacagtagtgatttagggctattgatcatgatttaggccatctccctcattttataggtagtgaaagcgaaagttatataaagcttggttgtaaaacctctttaagaaatcttcacatattagggccaggcctggcagctcacgcctgtaatcccagcaccttgggaggctgaggtgggtggatcacttgaggccaggagtttgagaccagcctggccaacatggtgaaaccccgtctttatcaaaaataaaaaattagcctagcgtagtggtgcgtgcctgtagtctcagctacttgggagactgaggcagaattgcttgaacctaggaggccaaggcttcagtgagccgagatcgcgccactgcactccagcctgggagacagagcacaaaacctgtctcaaaaaacaaacaaacaaacaaacaaaaaccagagaaatctttacatattagagcctttgttaaaaaaaaaaacacaaaaaaccaaaatcatattgatttaaatgaaactgtcttagttttcagaagaacaattgcattttgcaaagtgagaaagtatttccaacttctgtgtatggatcagatagaatatgtctaagtacaagttaaagaaggcttgaatgagggttcaatttgttaatgcattttaaaaccttttcaagaccacattcatcatctactgtttttctgcctacagcatctttctatgttgatacattaatatctgttgtgatgcttcctcttggcttggttgacttgttgatagctgtcgcataattaatgactcgatcctctgttgtggcttgttaggttgtagcatttcactgtgccatacatctttgacctatatatacttgagcccgagagctacagtaaattttgtcaggctgttcttccaaatgtatactcctcgccttattccagtaatacataagactataagtttcctaaatcacttgtgaacttgagcatcgttatattttttaaatctttgttgttgtttttttaaaatcactgtgaagtttccttaaactgggtgtgtatgtgtgttgtgttttggcagggggagggaatttttatatcctttgcccatttttcttttgggctatctgctttaggtctgtgaatgaagtgcattatttacatgttgattttaagtgttcccggtttaatttccctgccagttttactttaccatgtcttcctcaccttttgagttctttatggtgacctgtgttagtgagagcccatgaggtgtcatcagcagacttggatcccctcaggaccatcagggtctttgagtttctaaatatctgccaattgtttttgtgtataacagtagcttaattgggtatagaagtcttatgtgactatctttcacttaaatttctgaggaactggctgggtgctgtggctcacacctttaatcccagcactttgggaggccaaggcaggtggatcacttgagtccagtagttccataccagcatgggcaacatggtgaaacctcatctctactaaaaatacaaaaattagccgggtatggtggtgtgcgcctgtagtctcagctacaggctaaggtgggaggatcacctgagcccgggaggtcaaggctgcggtgagctgtgattgtgccactgcactccagcctgggtgatgggaatgagaccctgtctttaaaaaaataaataaataaaataaataaaataaataaataaattctgaggaattatcctactggtacggcatgtagagatgtggggatacctttttaatgtttgtcagatttttatctaaatctttggaatttaaaatttttactagattatatccaagagtttattattagtttttcattgattttgtctgggtcttggtgtagaaccttttgatttaaaggtgtaagtcttcacctctagaaaatcattttaaaattaatgtttttatatactttactctttttgtcttaagctttttttgtttttttctggaactctcatcagtgtgcctttttatcttcttgctttagggatgacttctcaagctaatttatagactcggtatctgcattcactaatcttttcatcacttaattgaaatagacatacaaagaaagtgtatgagagctgggcttggtggtgtgcacctgtaatcccagctacttgggaggctcaggcaggaggatcacttaaacccaggagaccaacctgggtaacatagtaagactccatatttttaaaaaagtgtaaaaatagtgtgtgaattgtaaagagtacagcttgatggagtttcatgcactgattctagtcagcaagtcagtctccagaccaagaatcacaacttgcccagcatggagaagcccccttgggccccactgggggtgggttgtggcagtgcccagcttcccttggcttcagccggtgaattcccatcctggacccttgaccatcattggtgactcttgggggtcttctagttcatcctgctcagccctctgctgtctagaatgttctgggttcttcttgaggattataggcttttctagtgaggcagcttatccattcatctgtatttgagtcactgactaggcgtgacaatcccgttttcttttttttttttttccttatgccaatccagttttatctacatgttgttttgcagaaattcctaaaggttccaagcttctcttgttaactttcttttctcaccagggatatacagactctcctacccatccttcccattttcatatttattttttcatgttaatgagggcaggaagtttattgcctgggctgagttcatttatacaggctgagtatgtctaatgtgaaaatctgaaatttgaaacttttcgagtgtttacatgacactcaaaggaaatgctcattggagcatttcagatttcagatttttggattttggacattcatttggtaagtataaggcaaatatccccaaatctgaaaaaaaatcatttttttttcttttggaggcagagtcttgctctgttgcccaggctggagtgcagtggcatgatcttggctcactgcaagccccgcctcccagtttcaagtgattctcctgcctcagcctcctgagtggctgggtttacaggcatgcgccacgatgcccagctactttttatattttttagcagagatggggtttcaccatgttgtccaggctggcctcaaactcctgacctcaagtgatctgcccgccttggcctcccaaagtgctgggattacagatgtgagccactgtgcccagtcaaaaatccaaaatttgaaactcttctgttcccaagcatttcagctaagggatactccgcctgtaataggaattcctggtgtattttggtaaataaacctgttgggaaaaaggtcacagattcagggctgtagttttctttcagaactgactctaccatgttgggggaaatgtctattaactttctctttttgtgtgtatgtgttttttaaacaaacgataatgcatcatttattagagcagtggttctcacactttttttgtgggtgtggtctcaggacgcctcaaagttattgagcctcctaaagcatttttatttaaatgattctgttgattcatatgtattgtaatagaaattgaaacataagatgtaaaaccacacggatatgaaagttccattaattagctttcagagcagtggcatcatcacacataatgtagtctctggaaaattccactgtacatccatgaaagagtgagagcgagagtgtctgactttgtagaccctctgaactagtctcaggaaactccagggattctcagaccacactttgagatctcttgtgctgaggaatgttttgtaggtttcctttttcattaagctcctgtttgacgttttgtgtgtacacatgtgatgtgtgtgcaggtgcgctgggagttgaggcagcggcactcctgaaatgtgtgggaaatcgcctgcatgtaggtgtgctgttgccggcgcagagcggagtgttcagcagcctatgtcacatgccatcttttctcagaagttatctttcatcctagtcagattttaaatgagggtgagtctgtagttttcatcagattcttctttttctttctttttttttttttgagatgagtctcactctgttgcccagactggagcccagtggcatgatctcagctcactgcaacctctgcctccccggttcaagcaattctcctgcctcaacctcctgagtaactgggattacaggtgcccgctaccatacctgactaattttttttttgtttgtgtatttttagtggagatggggtttcaccatattggccaggctggtcttgaactcctgacctcaaatgagccgcccacctcggcctctcaaggtgctgggattacaggagtgagtcaccgtgtccagccattttcatcaggttcttaaaggagtcccctaatttctcactgtagcttaaggtaggggcataccttaaagttcttagagagttgagaagttattgtggttgaaagagtttaagagaaacatatcttatgtaattccatatacaaataaaaatgttacctctctttgtgtgtataaatcctgtaggaatacaggttttagctgtgctccagtgtgtttctttgcttagagctgcttcaaggcaggtttcagtaagcaaatgaagccatgtgctccacattttggtcaatattgattagttgaatggaactttgctgcagttattttattgaaactaagcaatgtgattggagatgccttgacttgagagaaacgcgtttcagaattcgcagtctgaacgcacgtcatcccggggccctcattttctaaagattgtccaggtttatcgatagactctaactgtgcccctctctttcaattgtcccatagattccctataaggagcccctgctggtgcaccagaactaccgggggccatctgcccaactgccccagactctggcagtggggcccccgatggcagtgggcacctccccgtgaaacctgccaagctggacgccacagctctgcacgacgacactttggccaactccgtgcccccttcggaggcatgcaaccatgcagtcctagcctgcagcctgggcatccctgaggaacactacataagcgaggctgtggaagatgctcccagctacagagggtaccgggatgcctgcaccattactggtatgggggccctttccctgccagggaggaagggagggaggtttcagtcactgaggactagggaaggaatgcagccacatgggagggtcttggggaggtatgtggagaggaaccaccaaagtgcaaaagactctgagctttcggattgtgagacctccaatccagaacctgttctgccagtgaaccattttgtaacttgtgtcagttgttgacctactatcctgactgagaggtagacagcatttcactaaattgtcatgaaggttaaagatggtaacatccaaacctgagcagcaagcatggcccatcacaggcactcagtgtattgaacccttccttctctctttgcactcagcttcttcagatataagacaggtgtagtgggaataacatgcactgtcattgtgggatgcaaaaacagaaaactacatggagtgccctttgtacaccatcaggatttgcacagacatggatttttacagatacctgtgtcagtcataactctcagtgtcccaggtggtaatcacctaacatctgtgcgggcacttagtagtagagctattgcttttttattttccccaaggaagcattgagacaagtgcttgaagctagcacaagagagggctctcaatggaaatggtgtaggatggtgtgcataacagcagcaagtggcaaaattatagctcaatccagttgcattcatatagaagtttgcttaatttctcatttttgtctgcagtgtttgcttttgtttgtctgtttgaagtaatgcctgatgacagcttaatatatgcaagttggcttccagtagcttctcttggttctgtgttaccagttaagccttgaggacctcctgtgtgtcaggggtttcctggatacagaaaggcacagagaaagccgggggtcccagcctggtgcctagctgctgtgctaggcccccacacacctcctctccctttttgttaagtggcccacatgtgttgtcctccgcttgtgactgagtccctctcccacttgcctgccccctgaaggacacagttccaacatctcccttttctctactgcatcattcttttccccttgcacttgggtctttcttattagtgcagaaacatgctatgatctccctcttcggaaatagaatccttctcagtcccgtgtttcccgcaggccagtgtctctgctcttctgtttgcttactctagtttttcttttgttctctctggagtccactgcaggcaggctcatgccccaccacactgacagcctggttcagtccaggggtctgtcctctgccttcaccttacttcacttttcagtggtagttcacactgttgccaagtcctgtgtcctggaagtacagtctttacttggcttctgggtccccacactctccctgttcttctgcctcagtggctgcgtttcttcttctcccaagcctgggaacgttgaagggcccggggcccagcctttccgcctctttgctcttatgtgtgcacctgtgcagcacttgatctcacccagcacacaggttttaaaatcgccttctgtactggccactcggtggtttctgtactcagcctggcccttcctccttaaggccagatgtctcagactgactccacatgagtttccacttagatgtctaacaggcatgtcaaactcaaatgaccaaaaatgagctcctggtttccacctgcacctgcttttcttagggttttccccatccttgtaaatggtgctttcattattctagttgctcaggccaagaaccttggaggcatttgtgattctgcctttctgcgattcataccccagtttgtcaagaattctgttggctgtatcttcagagtatgttcagaatctacccagcatttactgtgtcccagccacccccatctcacacctggatgaccgcactggccttccagtggggcctcttactgctacccttgcctccctaaaattctttctccgctcaaccatgagagttggcttttaatacaatcagatggtttaactctcctccaaacttccagtgagctccccttctatagagacctgtaaggaaggggctgaatgacaggaatccctctttgccccgctgacctgcctcctctgtgccctccgtgctccaggtacactggccgcctcacttaaccttgaactcaccaggcacatccagcctcagggtctttggattgccttaactccagatatccttatgaccccctcttccttctccaagtgacattttatttgatgctttttgtgacccccccccaatacagagtgatctgcctcacctttccccatctccctttcctgtttaattttttcccccaaacttaaccatctgctgaactactgtatttgtgttttgtctcccaaacttgcagtagactaaagtcgcggagggcaaactctgtgtctactttgcacactcctgaatccagtgactaacgtagtgcctgcctgtggccagcgctcagtgaacatttgttgggtgtatcaattgtgtcaatttgtgcagtgagtactattatcctctttgtgtaagtgaagagtctaaatctcgaaaggttcagcaccttggtgaaactcctgagtggcaggagttgcatccaggtctgtaggaccccagggcaagggttctttgctgcctaagaatttagtctagttggggagacagatgagtgagtagaaattggctgtacaccgaggttagcacaatgataagcacagcacagtagggcaccaaggagggtgccaggctgaaccttggaggggaaaggacaggagaagaccacgagggctttgtggaggaggcgatgacccaaccgcatctacatttgtccaaacacatgaattgatccttgggattctagtggcatctgtaccagtgaaatccaggaagcatccagcctgttaaagtgctttcactttctttgaatgtgacagtggagggtaaagaaatggcagaatgtaccgctgaaacttcacagctgggcgtggtggctcacgcctatgatcccagcactttgggaggccgaggcgggcagatcacctgaggtcaggagttcaagaccagcctggccaacatggtgaaaccccgtctctactaaaaatataaaaactagccaggcatggtgacggacgcctgtaatctcagctacttgggaggctgaggcagaattgcttgaacctaggagatggaggttgcagtgagctgacacagtgctactgtactctagccttggcgacagagtgagactctctcaaaaaaacaaaacgaaacagcaacaacaaaaaacacaacaaagaagtggcagaatgtagtgctgaaacttcaaaccctataggatgtggtgacttgggggttctttgttgggaccagaggaaagctgagaaacagctcggtgctgttgtgtttagcactggcttggtaaacaggagagtaaacacagacactcttatgcgtttaagggatgggctgtcaggtgatggagaacatgctcggattaaagttttattaggcagtcattgaaaggaagacattaaatggaaaaaagttctccgagagacctagactatccccaagaatgcatctgtggcctcccagggctttgccaagtgcagtctcaggacactgcttggcattcagcccttgataaattcactcctcccccagttcccagcaagccctgagatgaacagcagactttttgttccactttaatttttaggcaaaaccgaatgcccatcacaaagccccgttctccttgctactccccttcccccaacctagaggtatcacatttttgggtgcgtcattttctgtttggggtggcttaacaagatgagctgatagggttcccaggctgcctggagttacataacccattgtgcttccaggacagctcacaatcttaggatttgccctaacaagcaaactcagaaaactgctgaggaaggcacgggagggtggctgtgcgaggtactgccggggctgagctctcatggaggctctctctgttctctgaagtgcctttggagtttatgtctgcacatggcattggtttttcaattcgggcagcccgtcagggctcagcctctgccaggactctgccacggcaagctcattcggacaaacgcctgtggtaagtttgtttgccaggtctgtctgctgtctgttttctttgtggtgtggtcggaaaggagaaaagaccacaggagaagctgtctctctcttgctccgtgctgcttgggaggttgttcatggtcatgtggtagagaaattgccatgttgaatgataggcagagcaaagggacttcagagacacaactactgccctcaccacccccccatctcccgttcccaggtccccttgtccccttgcccaggctcagtaggtgcaagtgacacttgcagggcatgagcacagggctgagttgagcccagaccccctgcactgccactccctttcccttcacagttctctgcagtgggtggacagggtttctaaggcctcctccgcctctccagctctgatttctctaatcctatgtcttgtctttatcctgatttcttagatgctaacctggtatcttgggtcagcaaggagtttttcagaaggtgaaggacagagttagactgtctccctccctctctcccgtttccctctcttccaccctccctttcttttttgtcctttactaaatgcttgggcctgggactcggatccacaccccagtgatggagggcttgctaatcagatctgctgtggcttgtgtctcttgctgtggggctgacacctctcacttcctctaagctggtcagagtccagtggttgatgacccatctggtttctgtcctgtctacacgctgcttcctgagagctgtctgggccagaaaacagttaattcctgagagaagtgagctcctgttccattccagtcagttttaggctttaaaacatgtaaatcttattgaataagcctaaagacacttcaaacatgcatcttactgaggcaatcgtacttatttttgtgtgttgaagcagcgtgcacccagggccaggtttttactggggtttatgttaattcctggggtcagagagaggactggtcctgccctcagagcacagaggtgggccagggtgtaaaggagaagctgtaaaccgagtgagaattgcctaggaaaaatctgctaacaggagtagccctgcctgggaggactcttcatcaaagggccatggcttagaatttgttccttttattttgttgtgttgtgttgtgttgtgttgtgttgtgttatgttatgttatgttatgttatgttatgttatgttatgttatgttatgttatgttatgttatttcgtgactcactgtattgcccaggctggttttgaattcctgggctcaagtgatccccctgcctcggcctcccaaagtgctgggattacaggcgtgagccaccatgcctgacccaggatcttttccttttctatcactgatttaagccataaaacttgatgtcttatcctctgaaaacatgctcaaataaaacattatggaattcttacacatcttattaattaaatttaaggccttgtcaatttctctctagtataatttttatttgtgttttctattgaaaatttataatctaaatgggtcttttatttggctatattaatgaaacagaaaagaatggacagtgaaatatatatcccttttacaacagagtgagaaaatgtaaattacaatgtagggaataacacatattttctaaatgtgtaatttagaagtttttttttttctccttctcttagtggaatctcctttatttcacagttgatttgtttttgcagatggaatgcagaaaggggccctgttatgctaatttctagagagagcatttgatctttgcaaaaccacagaaacattcacctctgccttttaaatatgctataaatgatttgggggccaccagctaatcttcctacccttcagttcccttatgactaggtgagtaggtagaatatttatcacaaggtttttgacataaattgtgaaatttatttaaaatgtcatttgtaagtttttttccatgtgattttggggccatagttctcaagtatttgatatatttttatcttgtcctaaatggttttagttctgcacttgaaacaaatttttttctgtcctgtcctcatttctgtcccctctcttctctcttctctattttctccccttcccttcccttccctcgcatcgcctcccctcccctcccctcccctcccctccccttcctttttttttttacagagtctcacttctatcacccaggctggagtgcagtggcatgatcttggctcactacaacctccacctcccaggttcaagcagttctcatccctcaacctcctgaatagctgggattacaggcatgcgccaccacgcccagctatttttttgtatttttagtagagacagggttttgccatgttgcccaggctgatcccaaactcctgagctcaggcagtccgcctgcctaggcctcccagagtactaggattacaggcgtgagccgccgtgcctggccgaaacaagcttttcatgtatataatgtatcaatctttgttcaccccaaactatttttggaagctggcaaataataaattataataggaaaaaaaaatggcagtttttggcagagtggccaggtatgggcctcggcaccttcctgctcagccaaggtctgttgtaggaacgttgactgggagtgactgagaggattcagggtgcaccaatgccaggctcaggctgagcagctgggttggtgtgtgagtctgggactcatggccccagggggaactttggagtcagaaacttctctgttttcactgagccctgatctctcataaacactgaaaaacttgagcaagtcaggctgaaactatcaggagctgaaactttattttacttttagagtcagagtctcactctgtcacataggctggagtgcagtggtgcagtgcagtcatggtgtattgcaatcttgaactcctgggctcaagtgactctcccacgtccacctcccaagtagctgcgactatgggctggagccaccgtgcctggctatttttttttggtagcagtgggatcttgctgtgttgaccaggctggtcttgaacttctggcctcaagtgatcctaccaccttagctttccaaagtgttggaattataggtatgagccccagtgcccggcaaaggtgtaactttataactagatctggaagaaatataatgttataaatcctgttctaggtttctctagagaaacagagccaataggagaaacatatatcgaaatgtattacaaggaattgtgttacttgatggtggaggctgacaagtccaagatgtgcagttggcaagctggaggcctgggagacccaatggtatagttgcagtccaaaggcttgacaggattgaggcccgggaactggtgttccagtcctgaagaccctgggggtgggtcagcctgtttgctctattcagaccccagctgactggatgaggtccacttcactcacagtaaggaggcatctgttttactcagcctgcttattcatgttcatctcacccagaaacactaccacagacacattcagaatcattcttgaccaaatttctggccaccccatggcccagtcaaggagacacatattatacagttagccttcacagatcctaatggtgctgccatttactgaggagtagctctgtgcctggcaggtttccaagtgtggctcctggaactcatgttgtcctcagcacagctctgaggtgggtactgttaccaccttcacgtttgaggaggcacagagtaggcagcttaacctcttgtataaaatagggatccttgaggtttagacccggcagcattgttttctgaccctctttaagttactgttcttcattttttttctgttttactaatttcatttactgttaaatggggttttaaattatgaaaataacacatgcacgtggtaaaacttgaaagtgtaccaaaatatagtcagtgcagagcagctctcactctaccatcagtgcagtttaatgggtaaaaaaatcattccaagaagtttttatgcacatattcattttctaaaaaacacagatgggaccatatcctattccttgatctgcattgtaagatgattaaccatattacttaaaatgaattcacatactattaccttattctttaaaatagcgacatgatatcccattgtttggctttatcatcgtcatcatcatcatcatcatcatcatcatcagtcatttaattaaaccaggctgtggtctgaatatttgtctccccaaaatgagtatgttgaaacctaatcagcagtgcaatggtatcaggtggtggagcctctgggaggtggttaggtcacaggggcagagccctgatgagtggattagtggccttataaaagaggttttggagagctagctagcctgttctaccctgtgaggacagagtgagaaggtgccatccgtgaaccaggaaccaagcccttaccagacatttggtggtgcctttatcttggacttgtcagtccccaaagctgggagaaataaatgtttgttgttgacaagccaccagtttatggtattttgctctagcagcctgaacaggctaggaaaactcagcagctctcagtcctggaatacctaatatttctttttagaagaagcattttgtaattcatttttttgttacccttaaatgaaattcatagataacgaatcctcttaaaaacataattttatttattttatttctatctttttttgagatggagtcttgctctgttgctcaggctggagtgtagtagtgtgatctcagctcactgcaacctctgcctcccgggttcaagtgattctcctgcctcagcctcctgagtagctgggactatagatgtgtgccactacactcggctagttttttgtgtttttagtagagatggggattcgccatgttggccaggctggtctcgaactcgtgtcctcaagtgatctgcccgcctcgacctcccaaagtgctgggattacaggcgtgagccaccgcgcatggccaaacacataattttaaaagaatcagtataatgccttaccgtactataaaggagaaactaaagaaaaatgacatagcttgtatttcaaatgtcgctgaggggacgtggcctcattagaacacataatgagcaattaggccctgcccctgcaggtagaattgctgtgaagggggcagccacaaaggcagtgaagcatgctggctactcaagggtccaagacagaaccactgcagcagcccccattgatgggtgctgtaagttgttttcagttcttgcattttaaatggtgcctcaagcaccattcctactcactcttagaagcattggcttaaacagtgtgcaacaagaaaaatgcatacagtttaaagaatacactttgaggttttccaccttcatcttattcccagacctctgcctttcctcccaagggaatgactgttgcttatctttccaaaaatgttctgtgcatgcgtttgtatggtatgtatgtcccctcccctgctttgaaagctttctacacacgggaacatatactaaacatattgttgccttttctcctcagtaatctatattggagacctttccacttagcatacatccatcatattctttttgctggctgcctatttttcattgtctataaatcccacgattgatttaattaattccctattgtaagacaagtagattgtttccagtattctgcaaataccactgggttggggatagccatgttcccacatatttaaacaaataagtaatgaatgtacttgtgtgaattcctaggctggggactgtaatttgatggagtgagtcatagaggttgtatatggtgtgtgttcagacgatgtgggagaagtgtgtgggcgctcactgtctgcacccctggtatgagcacatttgctctttgccagctgaggtgtataaacggcagcagcccctgatcttgatttacgttcctcagtgtgtagaggctgagcattttcggtatttcctggaggaatttttattgtcttttctgtgatctgagataaatgcttaacagtttctacttttagctcatggagtgattgcctccaaaattctaattactatttatatcctatttttatactttcctttccatccctcatgtagcacatcactgcctggtaggcttggatttcgaattctggattttgaataccatgcggcacctgctgggcgtacctgaactttatatcaaggactcaccacacagtttatgatttgagtttttaaatttcccagacatctgccttagaaaacagaccaaacacatactgataggttggtccatcagagtgtgctctgggaagggttgtggaggtctcaccttgtaaactgctgtgatactgacaactatgtgaacaccagggtccagtgatgtttctatttccggaggagtatcttggaggacctttaagttttcctttcctcccttcgtttcattttttttcttctcaccctcttctctcctccatctctccttacccactttctgtctgtttcctctcccctcccctcctcctcaccctgatatctgtccttccccttgctgtctcctttcttctcttcctccatccccactcccctcctttctctgcttctctccacctcctcttccttgaagaaacaatggctttctttttttttctttttaataattatacagctgaggtggatctaggttggtgacgcctttagaagctttgcagcattcagtagagcttcttaagtacaggcagcaggcacttcacgggtcgtactgggttaatgttcttttgtgcttttccagcacatggaggaagggaggttgggcctgtggtcaactgaccctttcccagttgagtctgcaggttgtgagtgtgcagtaagtcttttgaattattagctggagttaaatgggaaggaagaggtgaggatatcaataacgtgaagcaggaaggctgaagaccgtgagttctgtggagggaacctgacctgcgggagagagggagggagaaagagaacagagagctccagccagctcaccctttggggtgactggaagctgcctagaaggtggttttgccctaatttacaaatttactgcccttttgaggccttatctggtccaggctcacttcctactctgctaccttctatcatggtgttggaaaagaaggagcgcctagcagggtgggccttttgagcatgggagtccacagtgtaccccttggagcccagttgcagggagagcaagatggacaggtggtttcatccagaattgggttttgctgtatgggtgccgtgaaagtcccacgagagtgagggaggccgagccttaggcaccagcgttgctggagccaaagggctgggggattccagctggacaggaagtgggcggtagaggccatgcagaggaattgaggggctgggggtctccatggaatagcggggataactgagggagagctgtgggggaagggggttgcagtcagggagggggtatctaaattccagatttcagaggtggcccgggtgtggctggcagaagtggcatgtgataggagggccgtggaggtcccagacttgagagctggggagtcaggtggtgtcaggtgtaggggtggcagtggcagcctggatgagtggctgcactcggtggagaggacggccgccaacctctaccggggcggagttgctgatgggtggacgagtgggcataggcgggggtaacccagctggatggcctgagtctcaagcgagcaaggatttttaaaggcaaatgggaggaaatgagagggggaggtggcccaaggagccagaggatgctggcaccaactccagacctgagtgcggcagctcagagcaagaccctaatcttgaccttccaggaggtttaaaccctagtttgattttgacctagatgatggaacgtttgcgtggtacgaactgaaccttcttagtgggagagatggaaatggttggaaagacgatggtgagctaagcctgtgggcaggggcccctccttcaaaccccagccacgcagagagggagagtcatgctgaggggctctgacgttcttctcttagtaggaattctgttcactttcccaaaccaacatgttcggtttcagcttatctcataaatataattatgctcttttgttcagctttgaaaaatcctgaccgtagaccattcaggttgtcataccttcaggtttgaactcattgcccagtgctattttaactgttgtttctccctatttatgtgagtagaaatgagaaggggcaaagctgactttgtgacagggcctggaagttttctgtgcccagtgtctcttcctttgcctttaatttgaattcaggctgcctgggatgtgtggtaaagaatgggcctgtccaggtgaggatgcagcaccatctagtgggccagagatgcactagcaacaggagacaggtttttgcaacttttggaatggattgaaggaaaggggagttaatcgtaggcagagactgccagggttaggaccagtggctcacacctgtaattccagcactttgggaggccgaggcaggagaatcgcttcagccaaggaatttgaagccagccactatgaaggcaacatagtgagactcccatctctacaaaaaatacaaagcttagccagtgtggtggtgcatgccctgtagtcccagctacttgggaggctgaggtgggaggatcacttgagcccagggtgtagaggccacagtgcgccatgattgtgccactgcactccagcctggatgacagagcaagagaccttgtctttcttaaataaaaaaatggtgacaggtgaggcaggtaacttagttgtgtagaagaaaagaaatcttctcccatctcatcttttctcctgccttgttccatctacctttattctcttcccatccactctgtttactggaactaattccagaagtagtttttgtaagggacggtgtcattatagccaagtgtggccatgtttttcttgtgtagactcatgtaaggagattctgatgggggtgtaatttcattcccatgtagtgaactttattcgagctgtcagtgattgtactttacaagactttatttatttattttgagacagagttttgttcttgttgcccaggctggagtgcaatggcacagtctcggttcactgcaacctctgtctactgggttcaagtgattctcctgcctcagcctccccagtagctgggattacaggcacctgccaccacacctggctaatttttttgtatatttagtagagacagggtttcaccatattggccaggctgtctcgaactcctgacctcaggtgatccacccgcctcagcctcccaaagtgctgggattacaggcgtgagccaccacgcctggccaactttacaggactttaaattagctgtgtgttagtcaagtgttgctgtaggagtgctaacagcctccaaatcctagtggttcctacaacatttatttcttgctcacagacatgggtcatctgaggattggctttgtttgtctcttatttggggatttgggccacaaagttgggacctacctaaggacatgttctcctctgggcagaggacaagagctcaagaggacagacccaaccacgccacacaggcatgcttagagcctcccactggacatggagttatgccggccacagcgaatcatgtggcccagcctgaagtcacagagttgtgaaatattttgcccatattgggcaaatagtgaaccatagcaagagtgattcaggaaggatgcaggaagaattgtggacaaagtgaacagcttagagtttagaatattcttaggtgacaggagtggcactgaatggccgaggtacattagttgctttcaggaaagcctcgtggtgccagtcacctctgaattattggcttcttctattagccctgcttgaggaggggaaggacatgactcttacggcctagagcaggagttggcaaactcctgtaaagggccagagagtaaatcttttaggtttgcaggtcagaaggtctctgtctcaactgcttgtctctgctgttgcagcacatgaagcagccatagacattccctagaggaatgggtgtggctgtgtttgggaaacacttttctttatgaaaataacagagggctgggtttccccttaagccatagtttgcagactcctggcctagaccttcaaggaatgacctctgtcatgacaccaacttaagagagaaccacctctttttagttgggaagccaaatagtattcaaagagctgttggtgagtccagcaatcctccacctatttactccgcgttattaagctgtaaacagtcgtttcaggtcattgaaaatcccggcaaccaaagcttattgttcttaagtatgaaatatcacgtacttatttatttattttttgagatggagtctcactctatcacctaggctggagtgtagtgatgccatctcagctcactgcaacttccgcctcccaggttcaagcgattctcctgcctcaccctcccgagtagctgggattacaggcgcacaccaccatgcctggctaatttttgtatttttagtagagacggggttttgccatgttggccaggctggtctcgaactcctgacctccagtgatccgcctgccttggcctcccagggtgctgggattataggcgtaagccaccgcgcccagccaaaatctcattttacctaccttaccctatcttcagaagaaatgtctgttaaaggtattagaagcttcttttaccttgggttttccaaacagttgatgtggaaggcaatttaatctttctcatggattcagagttatcttttgtgatatcttctgttttccagagatttgctgatgtgttaagggtatggtactgatgctggatgttttgctcattagcccagcaaggtcaaggttcttgtctcatgaccagggagaagtaggcacacggacactcagagagaggcgtcctgaaagcaggttgctggttctcccttcacagttgaatacaagggcttctctgtctgctgatggggctgtgttccctatttgtataaggtgtgagtttctggcggctctaccctgaccttccagtgtgcatgcgggcccctagtctgagccattccacattgatttatttcccttactgcgcatgtgttaagggactgaatttttcactgctggcatgtttaggcaagcctcctgtgcacaatgaccttggcagctcgaaagttctccagggaccctcccctgtctgcctaggaagagttctctgcttcctgcctctatcagtacgtgtgctcagcaggacttactttcacatttcttgtggttacgttttttcttgtaacagcttcattgagatataattcatgcttcatacagttcatccatataaagtgtataatttagtggtttttagtatgttcgtggggttgtgcaattatcaccagttcagttggtgaatctgttcaatttcagaacattttcattcaccccccgaaaagctcctttccctttagcaatcatccctcagtctcctcgcatctcccacagtgtggctgcattcttttttttcttttgagatgaagtctccctctgtcccccaggctgaagtgcggtggcgtgatcttggctcactgcaatctctgcctcccaggttcaagagattctcctgcctcagcctcctgagtagctgggattacaggcgtgtgccaccacactcagctaatttttgtatttttttttcttagtagagacagggttttgctgggttggccaggctggtctcaaactgctgacctcaagtgatctgcttgcctcagtctcccaaagtgctgggattacaggcatgagccactatgcctggccatgcgttcttaatacgctttcaaagatttctactgtcattgttcttgattccgacaggcttgcccctaaccttggagagcagtggtgggggatcgttcttgagtggtcatcgatgctattcgagggtacacttaacagacattttatggctgggctcgtgtctgtgatcccagcactttgggaggctgaagtgggaggatcacttgagctcaagagtttgagaccagatccaggaggagtggttccaacatggccgaaaaggaacagctccagtctgcagctcccagcgtgagtgatgcagaagatggatgatttcttcatttccaactgaggtactgggttcatctcactgcggcttgtcagacagtgggtgcagcccatggagcaggacgggtcatcacctcacccagtaagtgcaaggggtcggggaattccctttcctagcaaagggaagccatgacagatggtacctggaaaattgggacactcccaccctaatactgcgcttttccaatggtcttagcaaatagcacaccaagagattatatcctgcgcctggcttggagggtcccacgcccacggaacctcactcactgctagcacagcagtctgagatcaaactgcaaggcagcagggaggctgggagaggggcgtccaccattgctgaagcttgagtaggtagacaaaacagccgggaagctcgaactgggtggagcccactgcagctcaaggaggcctgcctgcctctgtagggaggcagggcatagctgaacttctgggggcacttctgggggcagggcatagctgaacaaaaggcagcagaaacttctgcagacttaaatgtccctgtctgacagctttgaagagaatagcggttctcccggcatggagtttgaaatctgagaatggacagactgcttcctcaagtgggtccctgaccaccgagtagcctaactgagaggcagctcccagtaggggccgactgacacctcatacagctgggtgcccctcggagatgaagcatccagaggaaggatcaggcagcaacgtctgccatcctgcaatatttgctattctgcagcctccgctggtgatacccgggcaaacagggtctggagtggacctccagcaaactccaacagacctgcagctgagggtcctgactgttagaaggaaaactaacaaacagaaaggaatccacaccaaaaccccatctgtacgtcaccatcatcaaagaccaaaggtagataaaaccacaaagatggggagaaaccagagcagaaaagctgaaaattctaaaaatcagagcacctcttctcctccaaaggaatgcagctcctcgccagcaacggaacaaagctggacagagaatgactttgacgagttgagagaagagggcttcagacgatcggtaataacaaacttctccaagctaaaggaggatgttcaaacccattgcaaagaagctaaaaatctttttttttttttttttttgagacagagtttcgcttttgttgcccaggctggagtgcaatggctcggtcttggctcaccgcaacctctgcctcctggcttcaagtgagtctcctgcctcagcctcccaagtagctgggattacaggcatgtgccaccacacccagctaatttttttgtatttttattagagacggggtttctccatgttggtcaggctggtctcgaactcctgacctcaggtgatccacccgcctcggcctcccaaagtgctgggattacaggcatgagccaccacgcccagcagaagctaaaagtcttaaaaaaagattagacaaatggctaactagaataaatagtgtagagaagaccttaaatgacttgatggagctgaaaaccatggcacgagaactatgtgacgcatgcacaagcttcagtagccgatttgatcaactggaagaaaggatatcagtaattgaagattaagtgaatgaaatgaagcaagaagagaagtttagggaaaaaagagtaaaaagaaacgaacaaagcctccaagaaatatgggactatgtgaaaagaccaaatctacgtctgattggtgtacctgaaagtgatggggagaatggaaccaagttgggaaacactcttcaggatattatccaggagaacttccccaacctagcgaggcaggccaacattcaaattcaggaaatacagagaacggcacaaagatactcctcaagaagaacaaccccaagacacataattgtcagattcaccaaagttgaaatgaaggaaaaaatattaagggaagccagagagaaaggtcgggttacccacaaagggaagcccattagactaacagcagatctctcagcagaaactctacaagccagaagaaagtgggggccaatatccaacattcttaaagaaaagaattttcaacccagaatttcatatccagccaaactaagcttcataagtgaaggagaaataaaatcctctacagacaaacaaatgctgagagattttgtcaccaccaggcctgccttacaagagctcctgaaggaagcactaaacatggaaaggaacaaccagtaccagccactgcaaaaacatgccaaattgtaaagaccatcaatgctaggaagaaactgcatcaactaacgagcaaaataaccagctaacatcataatgacaggatcaaattcacacataacaatattaaccttaaatgtaaatggcctaaatgccccaattaaaagacacagactggcaaattggataaagagtcaagacccatcagtgtgctgtattcaggagacccatctcacgtgcagagacacacataggctcaaaataaaaggatggaggaagatctaccaagcaaatggaaaacaaaacaaaaaaaaagcaggggttgcaatcctagtctctgataaaacagactttaaaccaaaaaagatcaaaagagacaaagaaggccattacataatggtaaagggatcaattcaacaagaagagtttgagaccagcctgggcaacatagtgagacctcttctttatttaagataaaaaataaaaatataataataacaaaatagacactttatgtgcactggagtcttgtgtatagtgactctatcacctgaataattactttttaaaattataatgttgtatttatttatttgtattctgctttgtaggttgtcctttggaattttccacattttgaatttatgtttgtgtttattggaaaattggttcaagtgaatgtggaatcattttactgtcagggtatatttgtttttcttaactgcatattgtcagactaatattttttggatgagtttgaaatcttttaatatccagatgatctcatttgatgttttgaaaaagtaaccattgttcatttttaaacagaatttcctgttcaggaaataatttagattaacaataaaacagatgaatgcattgaatggtagaggcacagttggcattgtgatttcatgagattttgtactattaataaaataagttttcctaatgtggcacttaacttttccagaatttaccccttgattgccagctaactttgcttgtcccctagttagagccacctttgaaggggaagacaggacagtcaggacagggggagggatgtgggccttgaactctggcagctgctcaggctaccttgaaagccttacagagtctaatcataaacattgggtagaaatgtttttggacaacagaaagcaagtctaagaaatcaattatttgggctgggcgcagtgccttatgcctgtaatcccagcactttgggaggccaaggcgggcggatcatgaggtcaggagattgagatcatcgtggccaacatgaggaaacccgtctctactaaaatacgaaaattagcctggcgtggtggtgcgtgcctgtagtcccagttacttgggaggctgaggcaggggaattgcttgaacccaggaggcggaggttgcagtgagccaagattgtgccactgcactccagcctggtgacagagcaagactccgtttcaaaaaagaaaaaaaaaaaaaagaaattaattatttataaacaagaaacttcatctgaactcccagattagaacagtaaaacccaagaggttggagggagatgggtgagattaagtgcaaaaagattattctatttttgctgtggataattaggaaaatacaggttaacctcttagcctgtaacctcttggtctgttaacctctttgcctgtacagatagtacctttaaaggtaactatctgtatcagtaaggattaagtttggctgtatagaacagtggcttcacattatagaatttatttttctctaaagtataagaagttcagagggagactgtgcagtactggtgcagccctgctgtccccagggttccatgctcttcctgtccttcagttctaccatactagatgtcgtttccatccttaaggtcatgtcacatctaagaaggctgcggaagctccagccatcatgtctgaattccaggatgtagggaaggcagcctttgagaaaggctctcacaccagtgcttttatctcattggccaacacttagccttgtagtctcattttgcagcaggggaggctaagaaatgtagtttttccatggggctcagagctttgatactaagaagagtatggatagcggatggccaccatgtgtctaccatgtctccttgactataattaaaaatatgatgcaggctgggggcagtggctcaagcctgtaatcccagcactttgggaggccaagtgaagtgaatcccttgagctaggagttcaagaccagcctgggcaacatggggaaaccccatctttactaaaaatacaaaaaattagccaagtgtggtgctgcctgcctgtagtcctagctacttgggaagctgaggtgggaaaatcatctgagcccaggaagttgaggctgcagtgagctgtgatcgtaccactgcactccagcgtgggtgacaggagtgagaccctgcctttaaaaaaaaaaaaaaaaaaaaaagattcaaacattcaacattagcattccctaacctaacccacatcatgaccctgacaagaaaacaatggtatttgcatagcatgatgggtaaatgatggaagtagttcttagctgatggtcaccccggacactacctggcaccctccattcccagcactgcttgtggaagctctgttctaaatcactaggagaaaaaagaatctggtggcacatactctacaatgcaaaagacagcaaagtgatgaaacctccagaagttgaaccaccaagaggcatgacaatagtaagatgagtcttgcccaatttgaccataatgctcctgtttgaaggcaaagtctcagaatgggtcaaaaagtgaagctttatctatgtgctttgcttaagaaattctcaaagtatgcaaaagactggaagttgggctaggagaaaatttagagaaagaagagttataaggagggattatttaatcagtgaggtcaggatctttggggccaggggcaggcgtgagtggtggttaggattttgacctccgagttcaggctctgttagaaaaccggttcactatttacaggctatgtgatgtgggtctaggtattcaacttctctgtgctgtagtgtattcattcttatgtcaaacggggataaatgttaggactcttaggaggattaaatgagttaatggatgtaaatgcttataagtgcttatggtaccactccataagtgtttaccattattactgatgtgtttgttatcattataagaaagtgcaactggatccctgcataactccatcaaacccaataaaatccagatggttcaaaaggtgattcaaagatgtaatgttggctgctaccctaggcacactgcctgtgaattagccctgctcagcaaacagcagttaaaataaaatagaaagaaaagatataatgttaaaaattcaactgtgaaagtgctagaggaaaatattgctggatattttactaatcttgagatgggaaagtccatcctaaacatggtataaaggctagaactataaggaaaatgactgatcgctttgagtgtgcaaaattaaactttacacaggcattctttaactgtgtatttgttcctgaaaacattgtgtgtgttcatgcacacgtatgtttattgtggcactattcacaatagcaaagacttggaaccaacccaaatgcccatcaatgatagactggattaagaaaatgtggcacatatacaccatgcaatactatgccaccatagaaaaggatgagttcatgtcctttgtagggacatggatgaagctggaaaccatcattctcagcaaactgtcccaaggacagaaaaccaaacaccgcattttctcacttacaggcgggaattgaactgtgagaacacttggacacaggatggggaacatcacacaccggggcctgtcatggggtaggggtggcgggggggatggcattaggagatatacctaatataaatgatgagttaatgggtgcagcacaccaacatggcacatgtatacatatgtagcaaacctgcacgttgtgcacatgtaccctagaacttaaagtatatatatatatatatatatatatatatatatatataaactttgtgtgtgttgcaaaattggacactaaaaataccaggagtaatgcaactttgtaaccagaacacttataaaaactgtccatgtggggataacttgaatagcccagacgggcagttcccggctgtggctggagccacacaaacaatagagggaaaggctgtggggtgtgtatgtgtgtgtgttgaggggtgggggttgatggatctggggcttctgctaaggtgagcacaggagaaaatacagccccctgtaagctgagagccatgcaaggctgaggtgctcctctctggggatggagtcctacacacagagctttttaagttcctatgaagtagtcctgaaagggttcctcctgcctttgcagcataagagctgaagggcttttttcccattgagggttgtaaacattcacactattctgacttcccttgcccaattcagcttcatgtgttgaattttgttgtcctggctgagccccttgccttttataggtggggtgtgagctttgccatttgacaaccaagctttttgtggcccaggagggagtagaggagtagaagacagaaaagcaagtcttgccttgtgtatttttgtgaccaggagaaaggcatcattttggcaaaagccccaggtctcccacaggtgttcagtgaaggtcctggccgctctgctcagtgtttgtgagggtcgattttcccagcgcagggcactgcaggtgcttgtgaagaaccagatggctgctcattccatcctgcagcatttattcagtgtctgctctggccctgagcagaccctgtctttgccctcttggagctgtgtagtccaatgacagagactgctggtaatcaatcactaaatcagtgactacaaattgtgatgggtggaaaatgccaggggccaagggggtaacttagcccacctatctagggaggtggccctgaagaagtcagtccatctgggatcagagggcaaaggggtggttggcagagaagggaaaagtgttccagacagaaggtccagaaggagttgtgaacccagaaaatctgagacggtgaaaaaagatttgacctaactgactccatcttgctcttaacctccaagctgtccttattcattcctggacacaggtagaaccaactttgggaggaactcatagtttagctttgaaacaaagaggataccagtccttttcccaaaacaaacctccttattgtccgtggactaggctgcctaaagccacaggattagaagttatgataatccttttttttttttttgagacggagtctcactctgtcgcccaggctggagtgcggtggcgcgatcttggcttactgcaagctccgcctcccgggttcacaacattaccctgtctcagcctcccgagtagctgggactacaggcgcccactaccatgcccggctaattttttgtatgtttagtggagacggggtttcactgtgttagccagggtggtctcgatatcctgacctcgtgatcctcccacctaggcctcccaaagtgctgggataacaggtgtgagccactgcgcccagccctagttatggtaatcttactaaattcaaaatgcatctattttgattaaacccatattattttcttatttattaaaaattacacgaagatcattctgttttgggctgggtttatagttttgtaacccctatgacaaaatttgatgccttatatagtattttacagggataagtatgaaatttgccaacacttgttttgaaagatgctgtgggctgacatcttcttttttttttttttcaaatctagaaaagagttttcacacttcccgagcttctccctttttcaggagactggttttcaaagcacttttctgtaccaggtgtgtgtcttctctggtcaaaaagtagcccctactccagagtgtactaagactccaaggaaagtttgggaagaggaattccatgaacctaatggtaatctaatccctttcctcagctcttacttttttttttttttttttttttttgagacgtagtcttactctgtcgcccaggctggagtgcaatggcgcgatctcggctcattgcaacctccgcctcctgggttcaagagttcgatactagcctggccaacatggcaaaaccccgtctctactataaatacaaaaattagctgggtcagctacttgggaggctgaggcacaagaatcacttgaacctgggaggtggaggttgcagtgagnnnnnnnnnnnnnnnnnnnnnnnnnnnnnnnnnnnnnnnnnnnnnnnnnnnnnnnnnnnnnnnnnnnnnnnnnnnnnnnnnnnnnnnnnnnnnnnnnnnnnnnnnnnnnnnnnnnnnnnnnnnnnnnnnnnnnnnnnnnnnnnnnnnnnnnnnnncttgttcacacgtacctgtaatcccagctacttgggaagctgaggcacgagaatctcttgagcctggaaaatggaggttgcagttagccaagattatgccactgcactctagcctgggtgacagagtgagactctgtctcaaaaaaaaaaaaaaaaaaaaaccaactaattttttgtttgtttgtttgttttaaagagatggggtcttgctatctcctaggctggagtgtagtggcatggtcacagctcactgcatcctctaactgctgtgctcaagggatcctcttgtctcagcctccccagtagctggggctacaggtgtgtgccaccacacttggatttttaattttttttttgtagagatgaggtcttcccatcttgcccaagctgatcttgaactcctaggctcaagtgatcctcctgccttgacctcccaaagtgctgggattacaggcatgggccagcgcacttggcctaacaatgtcattttaaaaagtattataggccaggcgctgtggcttatgcctgtgatcccagcactttgggaggctgaggtgggcggatcagttaagcccagttcaaggatgtagtgagccataattgcatcactgcacttcagcctaggtgacagaatgagaccctatctcttcaaaacaaaacaaacataatatttgccatttaaccattaaaaaaattaattttctcaaaagcattgttattctactctactctctactctctactctactcctactcctacgcctacgcctacgcctacccctacccctacccctacccctacctctacccctacccctacccctacccttcttttttgaggcagagaggcagagtttcactcttgttgcccaggctggagcgcagtggcatgatcttggtctctgcctcctgggttcaagtgatcctcctgcctcagcctcccaagtagctggaactacaggtgtgtgccatcacactcggctgatttttgtattttttagtagagacggggtttcactatgttggctaggctggtcttgaactcctgacctcaggtgatccaccgacctcagcctcccaaagttctgggattacaggcatgagccactgcacctggccaaaagcaccgtttttcttttatagagacgggatctcactatgttgcccaggctggtctcaaactccagggctcaagtgatcgtcctgcctcagcctcccacagtgttgggattacatacgtgagccactgggctgggcccatttaaacattttaacgggtatagttcagtggcgtttagtacattcaaaatgtgcacccataaccgtttagttccagaacattttcatcaccccaaaaggaaaccacctccccattagcagtcgctccacattgtccctttcccttagcctctgccagccgctaatctgctttctgtctctgtggacttacctgttctggacatttcatatgaatggaatcattcaatatgtggtcttttgaggccggcttctttcacttagcataatattttcaaggttcaccatgttgcagcgtatatcagtacttcattgcttactgtggctgaataatacttcagtatatctacacattttgtttatccattcatctgctgatgggtgttaggattgtttttatctgtgctactaagaacacgggtgtataaatatctgtttgagttcccactttcacttcttttgaaatataagcagtggcaggaatttgctgaagtgaaattgctgcaacatatggcaattgtgtttgactttttgaggaacctggttatgcatgtttttaactttgtcacgtgtaccgtaaacatgcttatgaattttacacttcagattgtttttattcctttcttagatttaatcccaggtgcaattactggtttaaggatcatggacacatttttggttctctaaacatactgtcaaactgtttactgcaagtgttgttccaatttacaccagctccatctgtctaaacactagttcagttgtgagcactttaattacattcatacagcactggatattttcatgtaaaataatcttcccttggttatttgataattgtagcatgtaacatacttaatttttttttctttttttttgagacagagtctccctctgttgcccaggctggagtgcaatcgtgcgatctcagctcactgcaacctctgcctcctgggttcaagcgattttcatacctcagcctcccaagtagctgggattactggcgtgcaccaccacgtctggctaatttttgtattttttgtaaagatggggttttgctgtgttggccaggctgatctcgaactcctagcctctagtgatctgcccgcctccgcttaccaaagtgctaggattacaggcgtgagccactgtgcccagccaacatatgcttttaagagaagttaccaagactattggaaatcaaaagtattttatctttttatttcctagcaaaacaaattcaaatcgacagtaatagtctattttttgagtattctcctggagatttaactctgggctgaacttatacacgttaacttttacgtttaaaataaatttgtgtacaatttttgctttgtgttttaatattagaatcaatctaacactaataacctgtactgtaattatcgcctgtttttttttagttgtgacattttggggcctccgtaacaggatccttcctccctttcctttgccctgcccttcttgtcctttcttgttgagcaacaaactggcatgcccaagtggaatgcgccacattcagttgccctttagcctcacgttggacaccctgtttccaaacacggctgagtcggctggattggctgtctctgtgcgactgcttctttgggggtatgtgtcaccggggctggtgcatgtatgtgtgagtagatggtaactcggtacgtgacaccaggctatgtggaactcaactgtgtaattttgtgtccgttttcttagaaagcgtttcttctgttggtaattaaggccatggaattctagagaactccccagtgttggttttcgttcctgtctctgaagcatagttagtctttcctttcccatcctatgagggtttctctgcttgtccttctctcttctggagatcccctttgctgttcacagcaagtgagctgtccctcagtggggagagaggcagaaaaggaagacttggacctatcccttgtccctttgtggctggggtgtgagccagggtggagtcggaggtcttgcttccatttctgccactgcttagccttgagacttcccccatgtctctgaaccttgcagggccacagtttccccttctgtcttttagatctgggtctcctcatttatgaaatgtgttcccaatcctcatcctgcactgcctgctggcttgtgagagtaaatgaaaggcagtaatagatacaagtgctttgcgttgttcagcaaacatttattgaacacttactagttaccaggcagggttccgggtgctgggcaaacagcggaaagcgaatcagcatctggaggtgctgtcgctacatcccgaggcctcttgcatggtgggacctgccgcaggccaagcacccatctcgagtctgctgctggtttgctctgtgacatttggccacctcctcagcttgaacacagtgtccttttccattcaatgaggaggttgcgccagtagtttttagctctaatgtcctctttgtaatttgtggaatcacaacttttgtggtatggaaagtaattactaagactgaatctctgaagatgttcagctaaagctgtaaactgcatagtcccttgatagagaggaattttctagaaggttgtctgtcagataccacttacaaagtatcacatacatctccagcaccagtgtggcctatgtatgagtctttattcctgccctttaatccttataattttaagaaaatggaattgtttccaagtctgtacagaatggtttccaagtggctgagtaggtgaggagtgttgtcttgtgaagtcattaaaacattgctgtgggtttgcagtcactgccatgggtaatgtgtcatgagagagggttattgcctctagccagagcgcctgcctccccaagcatagccaggggtcatgctctgcacccacctctctgatggccaagtggaaagttggtgggtaaagaaatggagtgggagagggacagggaggaaaaaaataaaaaagatggacctctgtatggtggccactatttgatgagcgaaggtcccttttcttgttctttgtcacctttaatgtggtctgtagcattctctgaagtcccagagtgtggcgccaggatggaagtcccagtgtgcagactggaggcatgcatgtttaatctggccctcagtattcaacatttagaaatcagggactctcataaaaatacagatccctggtctcttgggtggagtcagcatgtcaaggactgggggcgtcaccgggaagtgctgtgagtggcggctgccccccagacacagccctcagaatgtgcaactcttgctctcaccgctcagagaaatttagggtatgaagaaagcttttctgcagccacttacctttgttctacagaggaagaaactgagtcccaggcatatgaacatgtgatttgccagagtgataggacgaagttgagggggcagaaccgaggctgggcgtcctttctccaaactcttgaaactgtgctcctggccggcacccagggcctctcggcttccagcaggtggcagttgtggtgctggtttcctgccattgcctctttctggcattcctttcctccctctcctgttcttctctcctcctttgcttttgcttgagctttctctcactaggtttttcctctttctctctcctgtcttttattcttccctctccccttgctgttttctcagatctcctgccaactgggtgagtgtctagggctactttccttctagacagctcttctgcacactctgctcaccttgcagctactcaggtccctgttctcctgggcttagagccctcaagctccagcgtgcaggcacgaggcccagaaaccctgttggaatgatcgcactccctctctggaggtggccaccactcagagcatttaactcctctgtggaggaggaggtcccttgatcctagataggctgacttcttctgagagtccacatatctgtatttcttcttttcttttttttttttgagactgagtctagctctgtcatcaggctggaatgcagtggcctgatctcggctcactgcccaacctctgcctcctgggtttaagcgattctcccgcctcagcctcccgagtagctgggattacaggcacgtgctgccacgcccagataatttttgtatttttagtagagacggggtttcaccatgttggccaagatggtctcgatgtcctgaccttgtgatccgcccaccttggcctcccaaagtgctgtatttttattgtttttagagggagtttcactctgtcgcccaggctggagtgcagtgctgcgatcttggctcactgcaacctccacctcccgggttcaagcagttcttcctgcttcagcctcccaagtagctgggattataggcgtccaccatcacgcccatctaattttttttttttgtatttttagtagaaacggagtttcaccatgttggccaggctggttttgaactcctgacctcaagtgatctgcccgcctcggcctcccaaagtgctgggattataggtgtgagccactgcgccccgctgagatctgtatttacatgaggttctctgagtgttaaatgttggacactaatttagagctattgcctttgctgtaaaatgtaagcattgcctcaggcacctggcaggttttgtgaagctggcatgtcacctgagaatcagtgcaaatccctagacggaggagtctcctcctagccgctctctgcaggtgaggatctagccccagtcaggtggagaatggacacagctgcttctgcagctctgcaccttccaggtgccaagcaggctccagcacactttcttcactccctggtggccctaactgaagcccacatcctgggtaggagggtccattccaaatcttacgccttgggaaaaacctaggaagggttatacctctgaagaggtaaagagtccttttaggttattttactttcaaagtgatgtcataagaatggtaggtattggattgacatctgctgagcaattgaggggacatttaccatcccatgggactttcctctatgctggataaagacctagggtgatactgaggtgggtttgaaaagaccttgacactagatggctccacctgcctcatgttgcaggctgggcatgtgtctgtcctggacaggcaggggattcacagactagtcctgccaccggctgctgctctctccttcccttgttccatcactcttctcacacttactgttgcctggcaaagtagtaagggctgggctgaaggtaaggtggataattcaaagccttttctcttgaggggctcacaattagtagggaagagccacagagaatacacttctaacatcgtagtgaagtcatttatgtactgagaactgtggaagccagagaagagaggttaagggaggctttgcaatagagagtgacatttgaatgatattttaagatggagtttgctaggcagtgaagggcattctagggagctaaaacagctggtctaaaaactcagatttgtgaaaaaaatgtgtttggaaaatggtgagaagttggtatgccttaagtgaagggaaattggagaaaatagcagaggctgggcttgataagaaaggctgttagggtgttgagttagctgctttaacagagaccaaagtaattggaactgtagcctcaataaggtagttgtttatttcttttacttttaaaagttcaagtggaaggaggtccagggtgtttcaggcagctgaggtagctctggtcatttcctgggcattgcctttactaatttagctaagcatggctccagcaccaggccaactctgcaactggacagacggaaagggcatgacttggaagttctgttacatcctgttaaccaggcatgtggatacaccttactgcagggaaagctgggaaacacagtttttagctggttggccgtgggcccagccacatcttgggggttgcatgaccaaaaggaagaagtggcaattgcatactgggaaacactcagtagcctctcctgtagaaacgtagaggcagaatgatgaagcactttatagggagctgggaggtttttaaagagcaatagtatgatttaaaaagctctttgagagaatgagatgggagggtcatttgaggtcaggagttcgagactagcctggtcaccacagtgagattccatctctatttaaaacaaaaaataaaaaaataaataaataaaaagctcttttccagaaatggcaccagccacaatgtggccggccaccatggggcattacagtaactgggcaaggaggcgatgccgaggggtaagcctctccttatggttgagcctggccttttgatggtttgacaggctgggggttggtgggattttgggctgttgttattgcatatctacctgaagccatggacctttgggctttgggattggtcaggaaattgatgcccttcatttgtgacttatttgagaacacattttgacttgtttacattagcttgttactaatgtgaattgtaactgtggggaaatggtgaccacagagagcataaagggttcctttcctccatggtgggccggcagtgtccattcacagcaggagcttgaataagctcctgtcctgtgcaggttcctgaccctccgtggttctgcagacaagttagtaaattcttgcctctgcttcctgtgcttttttttgttttgttttgtttgagatggagtctcgctctgtcaccaggctggagtgcagtggtgtgatctcagctcactgcaacctgacctccgcctcccaggttcaagtgattctcctgccttagcctcccaagtagctgggtttacaggcgcatgccaccacacccacctaatttttgtatttttagtacagacggggtttcaacaagttggccagggtggtctcgatctcttgacctcgtgttccgcccacctcagcctcccaaagtgctgggattataggcgtgagccaccgcgcccggctactgcttcctgtgctttaaaggggaaaattattccaacacctccctaatttgtgattatgtttcattttacatgcctaccacaagtatgaagtcttccacctgtttagaacaaaaacttcctgatgatgacatcctgggaattccccagcatttcaagtgcaccctcctaggagctgggtagcaggtgttggaggggagatcacagcttttagtggaacagctgaggctgctcctacctgatctgctgcttagttagctgaatcaacttgaccaacaagatgtgccgcagccctcgtgcatcccagcttactgatctgtaataacaggcaaatctctgtgtgccacattgctgggacggtgagacaatggtctggcttgatgtttggcatggtgaaagcattcctggggaattcttttttttttttttttttgagacggagtcttgctgtgtcccccaggctggagtgcagtggcgcagtctcggctcactgcaagctccgcctccggggttcacaccattctcctgcctcagcctccctagtagctgggactacaggcgcccaccactgcgcctggctaattttttgtatttttagtagaaacagggtttcaccatgttagccaggatggtctcgatctcctgacctcgtgatccgcccgccttggcctcccaaagtgctgggattacaggcgtgagccactgcgcctggcctcctggggaattcttgaagactcttctgttacgtttacctgatgtcaggccttggatgtgtcctccccttgaggcaaacatggtgtctccttccatagggggtctgtggggcttttggccttgtggccaaggttaaggagagctgcacgggccatctccataatcctatcccatgtcctaattctttgggcctttaaagcatctgaaaatttgctgctaatgtttataaggctggtcatgtcacagaaaaatcaaatatacagttgttttttttttaaaaacagagtctcgctctgtcgcccaggctggagtgcagtggcgtgatcttggcttactgtaacttctgcctcccgggttcaagtgattctcttgcctcagcctcctgagtagctgggattaccagcgtgcgccgctatgcctggctaatttttatacttttagtggagacagggtttcaccgtgttggccagtcaggtctcgaattcctgacctcaagtgatccaccagcctcagcctcccaaagtgctgggattacaggtgtgagccactgcgcctgggccagagttttttaaaaaggcattttttcatagccttaccttttgatactttatctcactggtcatatgctttaaggaaaaagatatcacatgggcacaaggacccacactgtaaataggttgaccttcagccctggaaacatggaaggacgggtcaagtctcaacttttgggcaactggaagcatgctcataagtgagacattattctgagatttcttagaagggacttttttttttttttctggagtctgttgccttccccaccaccaaacagcattgacaccagatgattccagcctgttgtgtgggtgtgtcatgcgggaatgtgttggttccctgcctgttctactagggataggctggcactgccttctgtggagctgctgtggagacagtttgaccagatccatgtttagccaagagatgctaccgactaggtgtcagccctgtttaaccccatgttccctcagttacatggtggcattttgtggctgtgaggtctttcctagagatgaacttcatgggaactcactctttgcttgatagtgagaagaggaaatgttgcttattgtgggcccatcttgagcctttggatggtggtttattgctagtgggagatgggaagaaatgtgaaaaatcttctgccttgaggttgggctattgctctgcctgggggaggacatagcttctgttcccagcagagctttgcaaagtgacggagcaggtctggtcttgtttttggctggctgaaataccaagtatgcttgctgtgacatttcccccatgaggcagagaagtcccagcagtgagatagagtcccccctccaggactaaagctccaactaaaattctgaatgtcctcactttctcatttttaaccctttccttgacattttggaaaaccatgctgacttcctgagtggaaatgctctatggcaaagctttgcatattgaattgagggagagcagttagtacggaatggtaggaagctgcgggaggggtgggtgctgacaggtgttctcagtgggctcctgcccaaagggtgatgagtcataactctacgttctcttttctcacgaatccgtatttttttcacctgttgaatggccttcttatttgacacaaagtctctggcattgctcttcttccaggcagaggtgttccatgttctacctgagtgtgtacaggccccacagttactgcctttctgccttcctgccttcctggccttggctcaagcagggggaacagggaagggactggttctccctgctgttcctgctttggttctgcagtgaatccctggccctggccctgcagtgaatccctggccctggcccttcctgcttcctgtgacagtagcctcccgtgtggagcaccccaggatctactcccactgactgcaccagtcatttcctgtgtgtgtgcagacatgcacgcatgtgcgagtgaatgctcatatgtaagactgggcctttctcctttaattttatcttaccgtgtttaggaatacctcatacttttggttcgtcctcagcatctcctctttattttccctgctattgtgtggttttatttgtcacaagtattttttttttttctctcctctgccccttctaatatcttggagagggatggagactgaagagtgagtttggtcctccacttgatccaggttcttatttttgttttctacttcaaagcgagaacttggtactgtgactttgataagaattgacttcaggcccagcaagatttctcatgcctgtaatcccagcactttggggggccaaggcaggaggattgcgtgagcccaggagttcgagacccacctgggcaacatagggaccttgtctctacaaaaaataaaattagctgggtttgatggtgcacatcagtggtcctggctactcgggaggccaaggtgggaggaatgcttgaggatcggaggtcaaggctgcagtgagccaatattgtgccactgcattccagcctgggcaacagagtgagacactgtcttaaaaaaaaaaaaaagaatcaacctcagtaatattcttatcttttgaataatttttctttgttgaagagtcattcctagaacaaaataccaagttaactctcctctcctgtctagttgtgtgcaccacaggcacttggtttatttatgggttgacaaaaccactgctgttcccatgggctgtttcccatcatagggaatgccttatgcaaataggctgatacagtggatgatgccagaattagttgatagataattaccactcacccattagcacttatttaattcagtctctgtgttctgctttgatgagtaagcactgggatagagaagtagggtacatatcctggttatgtttgccatgttgtcatgtttgcattttaaaggcctgcattaatgtgctttgtgtgaattggttctccgtcacaggcattagtatgcaccccctgagcacagcctgggccaagagctatggggtacaggtggtggatcaagggtagctgtgtatggaagtttgccctctcccaacaagatgaatcagacactgaaatacccacaagacacttaataagtgtagtaactgaagttctgacaaaatggcatgtcagtatagaaagggtaagagagattaattctgcttggtgtgctcaaaacaccaagctattccttaaaggatgggcacctattggtgtgattgctggatgccccataaggatataagtgtttcaagggcaggaccatgactcttgtgttcaccactgtgtctcctttgcccgtggtactcaggattcaaatggatggatcgatggaaggaaggaagtgtggatgaatgaacagatgaatgaataaattaaatgaaggcaaaattctagataggaggatagcttcaatggtaaaagagtggcatgaagaagttaggcatactggtgaaattaatactggtttggctgacatgtagaacgcttgaaggagaatggccagagaaagggttggaggaaagacttaactcagatgataaaagctcaaaaattttggcttttcttcctaaatagtggacactaaacagcaggaaacatttgggtaggtcttggccgtaagcatgcacaattcaaagttttgagactagaatttaaattggaaaaagactcctgatatagccttgtctagcttctttgtgctgtagataaataaccgaagatacctgccgcaggctacaagtttagttaactagcagcaaggccatagccatttctgggctctcatttcttggttgtcttgtctttagatgtgtgcaacagcaccgatcttccggaagtcgagatcattagcctgctggaggagcagctgccccattataagttaagagccgacaccatctacggttatgaccacgacgactggctccatacacctctcatttctccagatgccaacattgacctcacaaccgagcaaattgaagagacgttaaaatacttccgtaagtagttgtccatgtgtgttgtgatggcagtatcatgatcaggtcttcttagccatggccccaaataagatcttgtactggctaccctgtgatgtggcttgccacctctggaaaggtagtcaaagaaatgcggctgtaggggttaaccgcacaaaaggtcccaattttaaatgttctgaatagaaattttagaggagtgaggaccaagtaagattttcatttgaaccaactttttatgtatttatttttttgagatggagtctagctctcttgcccaggctggagtgcaatggtgtgatctcggctcactacaacctctgcctcctgggttcaaacgattctcctgcttcagcctcccgagtagctggggctacaggcgcgcaccaccatgcccggctaatttttgtatttttagtagagacagggtttcaccatgttggccaggctgaccaacctgagcactcctgaccttaagccacccacccaccttggcctccgaaagtgctgggattataggtgggagccaacttttttttttttttgactgtacagaagaatttgaaaatgttcctatttctatttcttaccaaaaatacaaatccttagaaactcactgggaaggtgtttgtctaaatttaaaaccaaagatattgggaatatccaggcttctcatttatgtgacatagcaaaatatgtgtaccaaggctgataactgttgtgtgaaagctcactaagctggatgtttggagagtccaaatatcactgcagcagcaaaccagtcattctgatgggctgcagagctgatacctggtaggataagcagtaaactaggtgagtgttttcagtgtggtcatgatggccagggtgtgaaacttgatattgcagacttgaaaaaaaggataatttaaaaaatgaatactttatgattctggtatttattcaaaatgtgcctttttagaagtaatttcactctttaaaaacttatggcagccaacaatttacatatctgtgtatcactgtgtcacttaaaaaaaagtatagcaatcctcctacctgcagataacttggttcaaaaccagcttatgttgcatctttaaagatttcttgtaattatttttactaatacaggctgatctctccaattttcttgaatttgtgagattatttgtaataaacaaattggtactgcaagtttctcctttagggtgtatctagggatgttttcagttctctttattagatattaataagaaaaaggttttgcttacattgacccataaaccctacagagtctttgtgaatactgcagataatcagtttcaatatggataataacagaataatccacaccagggtagatatgaagcatgttagaattgtactcatattgaagttaaagctttagaatttctaatgtgtcttgtagcatataggaggctcttagcaagtcattttgttgattcacaacgtctgtaccaccaaggagatatgtggtatcatatggaaaactgagtctacagtaacctccttggtagattttgtatttgcttttttcagactgtagacgtctgcaaaaaaattcacaagagaatagtagagtttgtaacagaattattttttgggaaatctctctgcgttacttacctttccttaggagaccctcttgtgattctgcagtacctatcatggccatttctctcacaggaggctcctgggtcccattcatacactttttttttttttttttttggttgagacagggttttgctctgttgcccaggctggggtgcagtggtgcacatatggcttactgcagctttgacttcctggtctcaagcaaccctcccaccttagcttcctgagtagctaggactacatgtatgtaccacgtaccaccacgctcagctaatttttaattttttttggagagatggggtctccctatgttgcccaggctggtgtcaaactccaggcctcaaacaatcctcctgcttcagcctcccaaagtgctaggaaatcaggtgtgagccactgcacttggcaccattcacactttgattaatcactgacatttacagtgtaattggaagaccatccatgggcaacaccacacaattttcagagaacattcacacaaattgcctcatttcattcctgtaaaatgcctacagttgggtagggctggttttatcataggtgaaatggatgtgtgaaaggctcagtgtttactccatgacactgagccacagtttctaaaatctgtttaacagtagacttgaggccgggcgtggtggctcacacctgtaatcccagctctttgggaggccgaggcgggtgaatcacctgaggttgggagtttgagaccagcctgaccaacgtggagaaaccccatctctactaaaaatataaaaattagccaggcatggtggcagatgcctgtaatcccagctacttgggaggctgaggcaggagaatcacttgaacctgggaggcggagattgtggtgagctgagatcgtgccattgtactccagcctgggcaacaagagcgaaactccatctcaaaacaaacaaacaaacaaacgaaaaaacaaacagtagacttgaacagagagtgagtgtcttttttgtttgtttgctttgtttttagttatacagttaagaaaaaaggagaaatcctggtagtagataacacaacttatgataaaactggaagaaccaaaataaacattgagcagagattctgaaagttcttagagcctgcttgcctccaagccttaacttaattctgtatcttctgtggttcctgtagttagagcaacatagctatttcctaaatatctgttaattgaacgatcaggtgttaactcttaaatacaggaccctgtagagcagagctctctcactaaggtcctgctacccctaaagggtctgtagagagaatttaggggttccatgcacttaaaaaggagcaaaaaaattacttttatttttattaacttctaactgaaatgcagcatttcctttagttatgaacatagacacacataggcacagtggtattagcaggacctgtgatattgtcaccagtagaaatcacagatattttcatgtcatgcttcagtggaagcagttactttgaataactgcctttgttcatcactgccatgaagttacatttgttgttaaatgtgctgatagatcttttatttcatgtcacagttgggtagagctgtttttattataggtgaaatggacgtgtggaaggctgagtgttgtggaatacactggaattctgtcttatttatttagatcttttatttcttttattctttaataaagaagcacttatcagatatcacagcctttttttgtcgttgttaatatcccagagtttttcaagttttagatggaattgttttccttttcagtcctttgtattttacgtcttcaaagctttctcctgaggaaagggtctgtgagccttgccaaactggcagagcgtcaccagaaggcacaggttcagagtcctgctgtgtgcatggtatcctttttgggtttcgtgtgtttgtttacacgtgtgtaaccctggagatgctgtgactcaccagtatgttgtatcagttttgaggcgtgtgagaagacaaggtagcctgcatcgattagggcagaggttctcggttgtgggcgggcatggggataaggagcgctggggttctgatacgctcccctacgtgagaaatcctagagaagagggccagctacacattgctatgcagatcagagcagacacagccccttcctgcacatcctccccctgagtggagaaacgcggctttaccttttaaatttggccctcacttgacttcctaagaagaggcgagaaagctttgggcatccacctttgccaggtggtacaatgaccttttcagagaagttttagtgcttctcccagtcaggtggacttgtaactcctgagtctgagaaacacagaaaattaaaatgacccacaaaacaaatatacccacaacgatgggacatttgggagaaagcatagtcaacgtacggtacttgcagtgtgctgggtaatcctcagagtggcctgaatttaatactcttgcattctgcacatgaggatggcgaggctcagggaagttagggaaaagtcacatacctagcaaggtgagtcagacctagtttgtctggtctgactccatctcttacccagtatctcagattagctacaaaggggacaagaaaacttcttgtttaagaatgaaattcatctggtgaaatacaaaaaaagcaaaaaccccatcaaaaccttagtttcaaaatctgtcagtagcttatttatttataaataaataaaatatatgtctaacatattcaaaattcattttttttcatggctcagggcattgtcccaagtgacacttagcttgatacagcttaatttgaagatgaggtttcttttttccctgtgattttcacctccatcctgtggcttgtaggtcacacttccctaatccctggtggaaatgacagtgtgtgctatagacttttgtagtcacataacacgcagcagacagcagacatgaaagctgctgcattggtctttaggtggctatgcaactctttttggtcccttcttccaggggctgttctatgtaactttttggttaaggagcattgattgagggaaaaaaaaaaaaatccatatctcacctgcatatgatctgcagaccaccctccctgagtttacctggagcagctttttcctaagaagagaaggttatgaagcaaataagagtttcaaaatattgttccatcgtttgcttttactgtaaagtaatattaaggaattagccaacagtatttactgagtgactggtatttacctctgatcctttgaggacttgtttgcatttcagctcaggttttctgactaaggagataaaaacatctcctggactatttatttttttccgtgacctaacccaaggactttgcactgggttggaccaatgcaggcagctcttgaggccttcggtgccatcctaccctgagttgcttactttgcttatgtgggaggagggaggggggtctgggaacctgcatattaaaccagctccccttgccattttaacttttaaaaattgaacttaaaagtaaacaacaacaacaaagacctttaatctagtccaaccatcattgttcacatggggcccctgaggtgcggggtgcattgacttgctaagccttgcacagccagggtatgtggggccaggaattgtgtgcaggtctcctcaccactctagagttgtgtccataaagtagaacctacagtaatattattatacccccattttcacctttgctcattcacttgtgtccacacggtcacagacatagcaagcgtttatacggttggttttatggggcaacgaacctcatgttttttactcatgcagggctcatcccaggagagtgggaatttgctcaagataaggcatgaggacccggagtatctggcatggagtttaactggaatccctctacctccaccactgtacctggaggctcctgtctcccctcatcctgtttgacccttgagcagggccgacacagtggtcgctcccttctggtcactctcctggcttggctcccagtgcctcacttgcccccagagttcccttttgtctctctggacagtctttccagcctctttcaccagttctttctttttcctcttcctctgagcttccaaatcagtggctgtcaaccctgatgcacctagagctttaaaaaatatagtctgccaggcgctgtggctcatgcctgtaatcccagcactttggtaggctgaggtgggtggatcacctgagatcaggagtttgagaccagcctggctaacatggcgaaactccatctctactaaaaatacaaaaattagccaggcatggtggcgtgcacctgtaatcccagctaacttgggaggctgagacaggagaatctcttgaacccgggaggcagaggttgcagtgagccgagattgtgccactgcactccagcctgggtgacagagtgagactccatctcaaaaatgaacaacaaacaaataaaaataaataaaatttaaaaaaaaaatacaatccttggccaggcgtggtggctcacgcctgtaatcccatcactttaggaggccaaggcaggcagatcatatgagcccagaagttcgagaccagcctgggcaacatgatgaaaccccatctctacaaaaaattaaaaaaaaaaaaaaaaaaagctgggtgtgatggtatgcaccttgtagtcccagctactcaggaggctgaggtggtaggattgcttgagcctaggaggtggacgttgcagtgagccaagatcgtgccactgcactccagcctgggcaacagagcgagactctgcctcaaaaaaagaaaaaggaaaaaaccagccctggaaccagtcccctgcagataccaaaatccatggatgctcaagtccctgatatgaaatggcatagtatttgcatttaacctgtacacatctttccatatactctaagtctagattacttgtattacttgtaaatgctatgttttttgtttttttttttttgtttggtgtattttttttttttgagtcagtcttctcctgtcacccgggatggagtgagtgccttggtgccatcttggctcactgcattctcaacctcccagactcaagccatcctcccacctcagccccccagtagttgggactacaggcacatgccaccatgcctcgctaactttcatatttttttgtagagacagggttttcaccatgttgcccaggctggtctcaaactccttggctcaagcattcctcccacctcagcctcacaaagtgctaggattataggagtgagccaccatgtccagcctaaaattttgtattgttattttatattgtttttttccccctgaatatttttgatccgtggtggatacagaggcctgactatatatcctccccaggccccaccgtcaggcatagtcattctaattgatcctcaggtgactgtgatgtactcctctaaatgttggcgtgcccagcctgcttctgtctatatcctctctcccaaggctgtaataccagccacatgttggtgactgccaaatgtatgcccaccctgaccttcccttcctccctcagcctcatgtacccacatactgagattattaactcatccattgcggaaagtggattgttccccctccacacacatttgtcttaataaatacaacgtggtttaccccatttctgtatcctcctggccatccactggccctgttaattcttcctccagatatatcccagacccgttctctgacctggctgctgccacccttgatgaagctactgccatctcatccctggacagctgtaactgctctcccagcttccactcttgcttctctgctgtactctttggacccagcagcctggcttgtctttttttgaaatccaactgggtcatgccgctcctttgtttcccattgccctttggataaaatgcggggtcttcggagactctgtgacctggctcttggctctatccagccagcctcgttccaccctctccttaccctatagcagccccaccagtgcttccagaccctcgaatacaccaaactcccatgaccttggatcatgccgctccctcgctacccctcttccttttctttttttgttttgtttttaaagtttttattatttctcgagactgggtcttgatatgttgcctaggctggcctcgaactcctgggctccagcagtcctcctgcctcagccttctgagtaggctgggactacaggtgcatactgctgtgcccagcttcttttctgttctttggttctcaacagaagtgtgctgtccatgacaagccttccttgaccaccccatctgtggcatcccccacttccgttgcctttttcctgccttcatagctttcatcaatctttatttgcttatgtaaagataaccaataattataataatgactcacatctactgagtgcttaccacttgccagcgttgtgctaaatgctttacctttacgagcactgcaggacatagacactagatttgttgtagtgcataatcctctttttgtttaaacaatttttcaaatatattacaattgttttatctaaattgaattggccttttaatccttgtttcaagatattaaagttagtttatgcagatgtaacactttttttatagcaatgtaaatggactaaaaatttttttaaaaagaatacttttaatactattgatgaaataataaacacattgatataattacattaataagcaaaacaggcgtgaacagacaggttgggaacacacacatgaccatttttccactgggaaaatgctcaattcacaagagcccagatgcctaggcacatgagacagtggtcagctggtcggcagtatcagcaggctgtgggcctttccttccttcctccccttccccttccccttcctcttccccttccccctccccttccccttcccccctcccctcctctcctctccccttccctcccctcccctttcctcctttcttccttacctttcctttccttttaccttaccttaccttaccttaatcttgctctgttgcccaggctggagtgcagtggtggcaatcacagctcactgcagccttgacctcttggcctcaagtgatccttctgtctcagcctcccgagtagctgggactgcaggtgcatgccaccatgcccagctagttttaaaatgttttgtagagacaaggtttcaccatgttgcctcggctgtctcacgctcctggcctcaagtgatccacctgccttggcctcccaaagtgctgggattacaggtgttagccaccatgcctggtctcttttttttttttttttttttttttttgagacagagtctcgctctgttgcccaggctagattgcagtggtgcgatctcagctcactgcaagctctgcctcctgggttcacgccattcacctgcctcagtctcctgagtagctgggactacaggcgcacgcccggctaatttttttgtatttttagtagagacggggtttcactgtgttagccaggatggtctcgatctcctgacctcgtgatccacccacctcggcctcccacagtgctgggattacaggcatgagccactgcacctggccttttttttttctttagagacagtcttgctctgtcacccaggctggagtgcagtggcattaattatagcttactgcagcctcgaactcctggcctcaagcaatcctcctgcctttccttcccaaagctatgaaattgcagacaggagccaccatgcctggctggtttttgggggccatggcaagtgcaggcttgtcagaggaattggagaagcagggattagttaggaaaacctctccacttcttgtgtttcatgccaggtagtgtttgtaacttcagaacccgcccttaccttacctacctaccatgttatgctcatttcacctactgtcccctgctgtatagggagtgccttgagggcagagatcatgttagttttgttccctcttctgtacagagggtggagcccagtacctggcacagctgaaggaggaatgtgctgctgctgtctctgtatttccaggtactccttgttgacctctagccaagacaaggaacctccttatgagatgtcatcttctgagctctcttgatggagggaataccacggtgatgattgaatatgaaaagtcttggcacagtggctcacacctgtaatcccaacactttgggtggccgaggtgggaggattgcttgaagccaggcattgagaccatccttggccaccaaacgagaccccatctctacaaaaaaagaaaaacaaaaccaaaaaaacatgaaaagtctcatccagggtatttcccactgggagttttactttcggcctgtgtttgtgtggaattggactgtgtgtgggaacatcccagctctcttcctcgtctgactagtcatccctggctttttgtctttgtttttagctaagtccctttttctttttggtgtggttagatgtggtcatctgtcagtgctctggcttggggtcttctcttgcctacatcttctttgctttggctgttgcctctctgcaggtgatggctacgtttctctctactgcctgaatatgttgccagaatgtcatagaaactgaacgtgtgcttgccatcctcacactagctgttcttaccacctgcccgacttccatagaaactcggggtggacatgcgccaggccctcaccaatgaccctgtccattctcataggtgccttcccctgttctcctaaatccatcgatgctaagtttgtacctcagtcctggttctgaaacctgtttctctatcatcataaagaaatcatggaacctctgtgtactttggtttacttttttggtgggtttaaggaagattctgtgacttcattggtgatgacatggcattgggagatagggtccatttctgattttcagagtgaggaagcaggcatgtgtgttactgttttagagaattgtggcacctaccctgttcttcagctcttggtacctggccttgtaatgaacacgaatgatctttaaaagaagttagattttaaaaataatatttttgtggctcacacttataatcccagtgctttgggaggcctaggcaggaggattgcttgagacaaggcatttgagaccaagctgggcaacatagggaaacccccatcactataaaaaaatgtttaaaaattacccaggcggtgcatacctgtagtcctagctactcaggaggctaaggtgggcgggtcacttaagccaggagttcgaggctgtagtgagctgtgatcatgccagtgcattccagcctgggcaattgagtgagacactgtttcaatacaaaagaaaaataaataaaaaataaataaataaataaataaataacatttcttttctttctttttgttttttttgagatgaagtctggctctgttgcccaggctggagtgcagtggcgtgttcttggctcactgcaatctccacctcctgggttcaagtgattttcctgcctcagcctcccgagtagctgggattacaggcacatgacaccacaccaggctaatttttgtgtttttagtaaagacagggtttcaccctgttggccaggctggtctcaaactcctgacctcaggtgatccacctcaggctcccaaagtgctgggattacaggcgtgagctaccgtgcctggacaaaataatatttctatcacaaaagtatgctgattttaggtgatttgaaaataaaaacaaaaagatgactaacatagtaaccaccactcactttttgtgagatttttttctagattttttttttctgcaacacatttatttaaggacataatgcattttaaataaatattgtatgttgaccatttcctttggcattaaatttcttgaaaaacacaattttcagcattgcttaatattctgtcatttatatttgaccattcatctattattaggaatccaggctatttctgtttcttccccaaataacacatgggtgaatacccttttacttctggatatcaggccagatagtacttacaagcaatttgcctgaaaacactgaatttggttatttaagaagcctgaacacatcctaaagatttttttatccgatacctgaggagggatgtcttacctctttcttagtttgtgcaggttgttattcattagtgaatgtttggaaaataacaaacaggtaatggtcaggaaggtgatgactaaagtttatgtgaatatggcatatcatttcaagaaagatgggttttttcccttaaactcaaagttatcaagagatcaacttctcaaactttggaccaagggcagttttgtgggggaaagcagtaacgtatgctatttgtggagtttagctagaattgatagatgcacctgatccctgtggagtagttgatatctctgtgtgggttgggtaacgctgctttatagtgaagcttttcttcttccaagtgcctctgagaggagagaaagtggttggagacccaccagtcctgcgttagagggccatttctccatcatccacggactaaatatgtgaccttgagcaaatcacttatcactgcattgggactcggtttcttatctggaaattaatcagcattaaatattttatggttctctgaatgtttctttgagagattttcactctctagttaatggtatcccatgatgaagttttttaaaattgttttttgttttatgaccatttcttaatttgagtttctctgtattgcaaaataggcattaagagaatagggacctttaatttttgttttatagaaattgtagtgtggttttctttttcaaatgcaagtgctgttaaattgctttcaggtgataatgtaggaacatcttataagtattctcagaaccctatagacatatgcacttaactctctaagcatgttttaaattacacaggacttttcttgttaagatatagatatgtacaaggcttaaattctagtagattacaaatcgtcgaaaataattttcatcttcagagagtaaattaatggagcagagtccatgtctgcttgaatgggccaatatcctcttcccagggcgttgtattgaataggtgcctaatgaatgcttcttaaataagcgaaaatgcaaagacatatttttaaatttaaaaaataagctttctccttccttatctttttccataaaaacaaaacaagatttaaaactcatgtatagaataacaagatcgttttatttgttgccactttccaaagattgccttcattttaattaaaatcctaagtgaaacaaaaatagagacactggccagatgtggcggctcacacctataatcccagcactcccgggggctgaggcaggaggattgcctgaatccaggagttcgagaccagcctggggaacatggtgaggctccatatctattaaaaaaaaaaaaaaaaagtacagacaccacaaaatgcagtacacctatataaattaaatgaataaatagcacacagtgctgaccttctgaaggggagtgtggtcataattttattattttatgaggtggtgacctaaaagaaagcatagggggtgtgtgtgtgtgtgtgtgtgtgtgtgtgtgtgtgtgtgtgtgtgtgtttggaggaggggtacctcttggaacatcaaagagtctgttgtcacctagacgtgtgcgtggtgaggcagggttgaatgaaggaaggaaggataaattattggggtggagtaggggttgtgctgagttggaaaggggatctaattcccaggaacttttcattatcatctgctaacaaagctaatggcaagatgtatacattataatgtatttataagtagttatcaagaatttctcttgtgtaaatgcccaagtactctggctgtgtcctttctgtcatccctaagctctggggccattttgtttacaggcaaggacctaagtgagccctgagaattgtgccttctcttctcttactgctcacgtatgcggtctctttcttgggcccatttttcaccactgttagttgacacagacgtctgcaggatcaaaggtagaagcagagacaccctggagcacagtcactttctctacattagccaaatgcagtcatgatgcctccacccaggtgtgggcctgggtctcaggtgctgagtggaattgagggtgcccgtcttggggaagtaatcaaaggcagcctcataccagggtgcacgacagcaccaggagcctttcacagtgtctagtgagcactgcagccaggtactcatactggtcagcagacctaccctcatggtccctgggcttacttactttgtcacctgtcacctgccaggtttcattttttgtcatcaaacccgattccaatgttgagtatttatttttttctttttaagaagaaaaatgcctggcaagcaattctgtacagatttttctttttcatgttatttcagcatatctaagacaaagctggaacggactcaggtgggaaattgacatgacagctcagctcacactccacctcccgtgatgggcccaggctactgtggttcagctgagttttggcgtgaatggaatacggggccgtttgagcttctggttcacttgtgttttgaggcctgtggcacctgctacgtgacttgctggacataggtgtgagatttcccatacagcctcccaggctggcaggaggcagactcagaaccatgcaggccgtgtactgatgctaccacacccaagccctttttcttctctctgtccttctcagaggtagggttgattttaatgagaactacatcgaggccaggatgcacgttggctcctcagtgctctgccaaatgccatctccctgcttttggatatgttctctaaaagccaagctttgttcccccaccttcccctggaggtgggttggtgcctgtgcctgaaatgaggaggagatggtttgggagggggtagttgacagcaagctgttcattagcagtctgccttctgccgtgggtgctcagtgactggcagcggcaacattttaaaaaataaagatcaggctgggcgcagtggctcatgcctgtaatcccagcattttgggaggctgaggcaggcggatcatgaggtcaggagatcgagaccattctggctcgatggtgaaaccccgtctctactaaaaatacaaaaattagccacgcgtggtggcacatgcctgtagtcccagctactcgggagggtgaggcaggagaattgcttgaacccgggaggtggaggttgcagtgagccgagatcgcaccgctgcactccagcctgggcgacagagtgagactccatctctgaataaatgaataaaataaagatcagaaagagaactctgcagaaagaagcaccctgctcagttaattttctgaagcaagtggaaggaagtcctgcttgtaaggctgtctttcatgtgagtcctatggccccctcaaggacggaaggttaggaagcctcttccgggtcttcctctcttctgccataggcttcttggctggcccggcatacaggtgccctgactaacagggaggaaagctctggagtctggaagcaggttccagaggggggttgggacctcggagggctctgtgtgctagcagtaaggtggagcactggggatgcataggaattgggaagttgttttgttcagatggccacatcggggcctgggcatgcctgtgctgatcacctgtgaggcatgggggaaggtgggatgcggcaatatctgtgaggtctgagacactcgggcaaactcataactgcatcatttatatactttattgctcaattgttagtgttcattcatctttttaatatattatataaattgaaatattcatatactcacccaactaataagtacaaacttagaaattttattaaattcttttaaacatttaaatttgattacaaatatgtttaattggatctgccttaacatcacagaccaaatctattagattctcttaaatgcttacaaaagagaacatgtagttctagtaatgacagcaaaactcctgatactcacacttaatataagcatcagtactgtgggtttaattcatttctttgtgaatttctgaatctgttttatatttttccagtgatctagtaatcttaatagatattaaagaaaatacgatctcagcagctgtgttagattcctagggctgccgtaacaaattaccacaaacttggtggcttaagacaatagaaatttattctctcacagttctggaggccagaggtccaaagtcaaggtgttggtactgttggttccttctggacactctgagggagaatctgttccctgcccctcttgcagtttctggtggctgccggccatcctcgacattgctaggtttgtggccgcatctctccaggttctgctctgtcttcacgttgccctctcctctgtgggcgttttctcctcttctcctctgaggacacttgtcattggatttagggcccacctcaatccaggatgatgtcatctcaagacttttaactgaattacaccagcagggccgggcacggtggctcatgcctgtaatcccagcactttgggaggccgaggcaagcagatcacttcaggtcaggagttcgagaccagcctggctaacatgacgaaaacctgtctctaccaaaaatacaaaaaattagccgggcatggtggcgcatgcctcccggctactcaggaggctgaggcaggggaatcgcttgaacctgggaagtggaggttgcagtgagctgagattgcgccactgcactccagcctgggtgacagagtgagactctgtcttaaaaaacaaaacaaaacaaaaaaagaagaaaatgaattacacctgcaaagaccttttttccaccttcacagcttccaggtggacattatctttggaggggccaccttcaacctgatgtcttttcctgaaattacagattatttatctttggcgacttgtggttgtgacctggtgtcccatccaaatgacacacttcacctggaacatgtttgaaaacatgtacgagttttgttagtgtcttactgttatcattagcagcttttattgagcttttattttctaggaatttggggccccagtgtgggcagtcagctctcctctggagccctctggccaatccgtcaccttacagccctggggctgatcctgctcctacccgagtatagtctgtgcccacagcatcagacctttctgttcttgatacttgcttcctccttccatgtagggttggcttattcagagccatcctacttagagacatatttgtacactgttttataaaaggtattagtggcagaaacagcagtcatacacatccacctctgctgcttcctaaaatggattaaaaataacttcctaatatattctcccttcctttatatatcagttgccctgttcacttggttgcccttttcattttgatagtcattgaagattcatggcctttacagactcaccttgtctcttctaaccgttattaactctgtactcttttggatattcaaattgtcacaacacagtgcatggtacgtgcatggtagtccttttaagatggcttttatataccttatcacttctacctcagaccttttgaagtggtctttgctttcttgaaacctggtgttgcaggtccctcttgatttttccctgcccgaagacttggaatcagccactctacaaggagccctgttaaggtctaacctaaatctgggcaccagaatgttgacttgctgctgatggattggagggctgtccttgttgagccacttgtgtgacagagctggaaagagttgttttgtttgtttgtttttaatatcatgaagttacatagatattttcagtttaactctcactttcctgatcatttattttgttctttaaaaaaaaaaaacttctcaatttgttttctctgtgaggtgctaacttgaatctttatcttctttaattgtacctcttcttttttttttttttctttcaaattccattagcaaataatccttggatgctttttcattcacttattgagaagtggaaaaggcttaggacggggatcattcctggtttatatccagatgcttttggtattctctgtgcaatcctgggcaagtgacttaagccactaagacccctttccttgtctccacaatgagggagccattaggtcgcaggggtctgaggagtaagtgagatataaagtattaaatgccaggtatacagtcagcactttctaaatggggcagccgaagatgcggtgactaaggaatggctgaccagtggctgtgaggcttacccgagacggctcctgggacctgtttttattcctgactttctagtggcagtgatggaggagtgtcaggtcatggtagggaggaggctgctttttcggctgcagtaaacctgggccgagggagggctgtaaccctcaggagtgttgggactcttggtgtgaaggaaagtggatttgatgtcagatagacttggattttaattgtgaaactcttcacagagctatggacagattactttgtctttccaagcatatgaaatacttttggtgtagttcactttgaaattgcttgaagctcgtaaaaatcacccctaaatgatgctgtttcctttgtgcttatttatacattgttttgtttctttcctattttcttaaaaagtgaattggatatgtgcagctttggacttaattcaagctgtgctcaataatgtattgtcactgtttagaaatggtgcctcgctccctacctcaccccacctgtcactcctgctcattactgtgaactcagtgcctttgaatcagttatgttggaaaaagcttataaatggcatttctacctcatttccctaattgtagcttaggaatttgtaccccctttttaattgttcatttcctggcttatttcccttaaaaaaaaaaagaaagattagagtgatgaagatgatcacaactaacatttattgcaaactctctttgtcccaggcactgtgctaagtgctctgccatacactaattgattatagcttcccctgtctctgtggaatgtattataatcacccccatttagcagatgagactgatgttatctaataaggtcacagacatggaaaacaaagagcctgtaccaaacctcagaccatctgactccaaaagcccatgctcttaactatgaaatctgttattttttacttgttttatggtaatggggtaggaataaaatgttaaaaaaattcatagtgctgtaaggtaaatgtgccaagtattatttaaggggtttctatcaaaacaaaaaagcaagcaaataagggatttgtatccttgtatatttttttttaactttaacaaaatttattcttataatttgagaatatattgttccatataaattgtattatttcattaaaatgtatttgtttcttgtttctgttacatataaaattgtactggagaaaacatgtgcaaagagatggctaggatttcagtaaaagacaaaggtttatagtgaaagctaatcttttatatagctcttgggattagttgaaccctgctgaagtattacatttcttcaattattctaaatttcatagaatgtcagtttttctatgtctattatatttaagtaatattcattgcattgttcttttattttttaattatacaagtaatacatgcggattgattggtaaaaagtcttgcagtctgtaagcaagacacacagtcataatcttccacctcctcgcctccccaaaggagctactttaacattttagtatctattttcttctaaaaagatatatgcagttttgaaaattgaacaactgcctaattaagaatgggcaaagggagccaaccgtggtggcccacgcctgtaattccagcacttcgggaggccaaggtgggcagatcacttgaggtcaggagtttgagaccagcctggccaacatggtgagaccccatctctactaaaaatacaaaaaattagctgggtgtggtggcacacacctttaatcccagctacttgggaggccgaggcatgagaatcccttgaacctaaggtcagaggttgcagtgagccaagattgtgccactgcactccagcttggacaacagagtgagactctgtctcaaaaaaaaaaaaaaaacctatgtgcgtttttgaacaaagatctttgatatgatttgtaaacaataaaaaatttatgcattacattttcatgccttagcataattttcaattgctgaaactcaaaaacatgttgatgttacttgattttgtttacatctgatttacttttctgtaagtagatataacttttcaaaaatgtagtcaatttgccaactttcatgttgttcttcaaaaccatcaatcatctcaagacaatgaatattgcatattgtactgaacaacctttcaatttcagcatgtggaacataagctagtgggcctgcatgtttagttgggtcataagaaagaacacactcgaggtactgaaacccttttcccagtagggacaacattgtatctgcatagtgtttgaaatctcctagattaatggcagccagtgctcctctatcccaaattctgtcaaatttgtcgatatgtgtttggggaagataataaatgctgcaacagtacaatgaaatgttctctgaagaactcttaaatactttggcttcaggaactttgctaattggttcttctgagtaagaaagattctgctctgtaaaaaattcttgtatcccaagtgcactgatttatacaccaactacattgtgtccttggtctgcaaaccatttcatctcaacaaggaggaaaaaataccttcagtctactctcacctttaagaaaagtatccaaatgcgtcttcaatagctgatgtccttgttcttgatgaaaagcaatattgccgttcacccacttgtcttgccattcttccagagttcgtacttggttttcctgacctcagtattgggatacttttccatatcaaatgaagctcttgtatcatccatagtttcatagacaccattgtctcataaatgtatgttttttaatgcctttactggtttattacaaaggatactgtgaaggatacagatgaagaggctccaggaacctccatgtgttcagctattaggaagtttgtctgactttcatgtgatgctttgaggagtttgcatttcctgttcctttattttatttttttagtttttggggtaaggtctcactctgtcacccaggctgcagtgcagtggcatgatcacatctcactgcaactttgaagtcctgggctcaggtgatcctccagcttcagcctcccaagtagctgggtctacaggcatgtgctaccacgtctagctggttttaaaatttttttgtagagatgagatttggccatgttgtccaggttgttcttgaactcctggcctcaaactatccttccttcttggcctcccaaagtggtagaagtacaggcatgagccaatgcaaccagccctctggttcctttattaaatcattttgcaaattcttgttggaccttccccaccctaattggattgaactggcgaacattgctgattttttaggagtttgttgttaactatttgcctgtttataaggcccatcatcatctttttagaaataccttaaggtatctcagaaaacctcgggacaccggactccattcacctgtcttgaggtgaacatctgaggggctgtttgggagcttgcagtggggctcttgagaggcaccatcatggccagagataggacaatattaaagactagagggagagatgagatgtgtcagatagcaggggcagttataagaaaggaattaaaatcatttctgctgactttaaatagtcacaagtcctagaaaactgaaaatgtatattcaagttgggatcagggagagggaataaagtaagtgagggaggctatgggatctgatatatactttgaccagaaagaatgtgcagtttggttgggagtgtcttggaggaggaagagatgatgacagaggggcacaggtcctccagggtgtaagtggtagccaggagacagcagggccagggatggtgtcattcccttgtctcctacattttctgaacttttctggaatcctattaacaattttagccaaaattcatcatcagcatcagtggttccactgcagcatgcggggatggtttctttgtctgcttgtggtttgggcccctgcctttaacttctcttttccctccgggacttgaggctctgttatccatagtgagtgccaaagggttggatccttgcagtccacaagaggacaggacctgctctcactaaaggctgggccaaatggggttggccagccacctggcaagtgggaaggtctgatgtggtatcctgcccaggtgtgcaagcaaggcccaatgataagggccagacatggctgtaacatgaggagagggtaccccagagcagagagagatttctttgaggacctcacaacacaacgttacaggctcttcagcttccagtgatttaggaagattgagatggatcgatacaaagtatggattccatctaagattctctatataagatgtgtgtgtctatgtgattttcctttaaatttctattttacacacagaagcagacatacacatacatagaaacacacacacacacacacacacactattatctgtatatatgctgctgttgacaccaacagatacttacagtacctggccaagaggacaatgaagtaaataagtagttttggtttagggcaaggttctcaaccaagcagttttatatccaggggacatttggcaatgtctggagacatttttggttgtcacatcttgggggtggagggtagtgctacctgcgtttagtgggtaggcaccagggttgctgttaaacatcctgcgatgcccagaatagccttccacagcaagaattacctaacctcaaatgtcaatagtgctgaggttgagagaccctgctttagggaatgaaattcaacctataggatagcctagaatctgtcttattatccactaccttgttttattatgaatatttcaaacatatcaaacatttagaactaatattaactgtattttttaaggaaataaaacatatgggtgcatttataaggaaagttttaaaacctcatttcctcactccttccccagaggcaactaacttcctgcaggtggacttttttcttctagtgtgcactttaacgccttgattacacatgtacgtgtccatgaaacagcatattgtactgcacaagccctttgtgatggcgccctcctctatttgtatgtgacaggctgtttttctagaagtttgagcaaaagcatgagcagagaatagtagtgcatctaagtgaaaatgtttccattttctaagtaatttacatttcctttaagtggtggtcaaaaattatagaagatgtttaatgtgtgaaatcaggttgaggaaaggaaaccaaaagtaatgatttgcagattttaaaaggtggcagatttcaaatccagagtcttctttctatcgtgacccaaagtagggtgaataagcttgtccttacgtttcttgaaggtgatgatggtgctgacccctctgtctctcccttgcctgtaccctttcttttccctgcctggcatctctcagcctctgctgccagcatccttggaagacatttcctccatctctgcatcatttttcagagccggccagtttctatggcaacggttagattgaaagatgagcggcgagcaggagacgaggcttgagtgagacagccagtggtggtgtgtgtctctgacgtcaccctctaggcgtctggataggacgatcctggctactcccattcagggctgctgtccagtgctgctttattggcagtgctgccagggtctccgttagctctctgcaaattgccttcctttctgctcctcctactccctccttcccccatagaatttttcttttcattgcccactttactgttttggctccagactgtcgttaagaatgtacagcctaattctggtgtgtttcgggatattcttctgtccagtattctggaagggcggggaggcatggcagcgttttacttgacgttgatggtgctgtgaagtccattctttcctctgcaagactactgactatgcagaaatttatcgaagcggattattatgaactagactggtattatgaagaatgctcggatggtaattatggcccctgcaaaacagagccgggatgtataggggtattgtctccttctgggtggggggtgtcctgaaacctttaggggagacaggcggctggcgggtgggaggtaccagaactagcaccactggctctggcaattccaaaggcatggtggaggaggtggcaggtgggcagggctctttaccgtgaaagactcctgcagtatgtatgattgtttgcttagaaggggagatggtttttggtgtgctgggcttgtaagtgttatacttctattggattgaattttctctggtgtgagacgtgagtgtgttgttgatgcatgaatgtgtgcaagtggaaatgtgttcactgcgctcttgctgttggaggggataggaaactgggggcttggaatagtgtgttcaggaggtggcttcctggactgtcagcagcaggcctggaagactgcccttttctgagcccagacctgggaaccatcagaggctggagaaaaggcagaagcagcttaccacttagcgggtgattcaaatgaagtttgcttgttggatccaacagagatgggggtggggaggtgatgggaggggcagggaaagaatgtgtccttctgtcactaccttggtttgtgcagggagggtgtggcacattccaagggagactgggtggaggccaagttgtgtggctggacaggtctcaggaggtttcaagcacacagaaaacagcactgaggtgcgttctcagagacatcacagtgggcggggtctcaggttcctggggtgttggacatcaaaattgtgtattacacagttaatctgtctttaattttgtcttgaaagtgaccctcatatcacatgccttcacaaaaaaggggcccaattaatatatacactttgagggtctgttccccagtgatgatatgttcccagccctatatgagccattaatagataaggtaagtgctttttaattgagtcgggagtttcagaatgctctattcctgactacatttgattaacctgaatgatgtaacaggctgggacctggcctagttagtaaactgaaaaactacataattatctcttatccactgatttttgccgcgactgtgggttaaggctttctcaggggatggtatttaaatgtgtggaaaaactatgccagttcaatctcactggcccccagctttagatgcagacattgtcatgttcgttctgtgtacatctttaactatcttgagtaacaaggattggaggcagttcccagggtcatgaggggaaaagatgagtgaattttttctttggaatatattcattctaaaagcaagttcccattctgttacctaactccaaaaggaaattctagagatgctcctttttggaaaccatcattgacctccttctagtttccttggtgatttgtgactcattgaaccctctataactttttaaagtaagggattgaatacatcctcactgtaccattggattagggagcactggttacagcagggtgctgtcagaggccccgtggattagtcaggtggggccatagctctgtggatgccatcctagaagtggaggaagaaggtttcctaataccatgacccaaatgccacaccatccagttccctttacaccctgaaataaagccagtcgcttgccatggtcaatctggagggtgagcggaggcctgctcttatctgggtatccatcagaaggattttcttacccagcacttcctcagttgagtcttttggccctgagagaccctgatctgtcttcctctaagagcaaaggaaaatagaagaggagatggctcaactgttcaagggtaaatatattgatttatttatttctgaattattgttattgtctgaatgtatgttgagcaaaatacttgtcctttatcatctatcccattttggatgaagggaagaaggtttttgagacagaatttactgggaccactggtattttcatactcccatttaaagaggtagcaaagtagggaataaaggaacagaagtccagaaataaactggtttaggaaacgtacaaaaaggagatttcaattatgtgccaattttgtggttacttgcttacacatttctaactagttgagttccttcctagcttcaggcagattagtctggaaatgaaatttgcccctgtttatatgtacctgtcttttatttgcctctgtcttttttattgcaactcaatagacacacaccattgctttgtctctgattatttggcatttgaatcgtcaatgagggaagcttttacagaacttttgatactaataaaaggtgagtcaaatgttttaaaaaagatgcagaatcatcatttatgtcagagctactgactcacacttaaattgcagtgttagcactgaaaaagaaatgtatatggatgggaatatagattgcaggccaattaggacccctcttttgaagttggaattgagggatagctactgttctcttctatctttgagggttaggagaactttattcagtgttgaataactgtattcctcctgtttattaatgtttgttgtgggggtcttctattcagcacccatctctgcctgtcctgctcccccgcccccagaggaggatataataagaggcatgggacaggggcttataataataagacatgggaggggttgattacccagtgtcttcaagtaacttttacgagagatttgaaatagccagcgatcaatgcaaaatagcaatggccttggcagaatttgcacatacatactcaatgtttacagtttaaactctggtgtcagacagggtcatagttaccccgattggatgcatcccatctctggtgcagaacctctaaaacttgggaaatcattgaaagtcatctgcttattaaaaaagcagattctcagactcacatcagactaggagaagtcctgagaaatctaaatttttagcacatgctttgggggattctttacatcacgtgtgtttgggaaactgtgctgattgatgtccatggaaagcagcctcaggcatggggaggggctggaaaagaattatttaggtcagtttcgggatcttagattgtttcttggctacactggccactttttaaagtgtgcttagaaagagtatgacacctttttaattttcaaaaggacttgggttcagtgtatgtccttatgttaaagaaacagccctctttgtagttactctagaaataggtagaatggcagaaagagcgctggctgtctgtgtttgaggcctgttttgtacttcatgtggccatgtggtatgggaacatcctgggatttctgtgagcctctgtgaactcagattccccatctggaaaacaggagtaacaacactggttggaacctttatggagtgtaaataaagtgatagctctttgtaagcgacgaagagccaggtcagtgtttaattttattttctcagaaatagtactagttattaaggcctttaacaaaaaaaaatctttgaaaaggctaatgggggcctggtatagtgtgtcatgcctgtaagcccagcattttggcaggctaaaggggggaggatcacttgaggccaggagtttgagagcagcgtgggtaacatggtgacatcctgtctgtacaaaaaataaaaacattagctgaatgtggtggcatgcgcctatagtcccagctactcggaagctgaggtgggaagattgtttgagcccaggagggtgagggaagctataattatgccactgtactccagcctgggcgacagagtgagatcctgtcttaaaaaaaataaaaaaaaaaggaatggtattttgaacaaggtacagcattttgaccacctgtttgttgcttcagtttcttttgtaatcagacttgctctccatccccgctcacctcccccttttataacctgatagatttgaatgttggggtaggaggtggtctagttcatactgatttcacaaatgaagaaactcgggtagattgtcgcagaagttattcttacagcttcttactctataatgaagatttatggtatacgcaagggcagtctggtgcgctctgttcctcacttgatttcagtgatctctgaaatgtcacccaagatggcggtggctggttcgtgagtgttttttttctttttgtgcgtgagtgaagttttgttagaggtattttaagcattaattgaaaagctgcatttctgaactgagttttcgaattttcctacgtgttgacgcaaacagatccccatttctttgtcttgtgttttattgtgtgatgcgcccgtgaaggtagaggttgacttctctctttccacacacagcactctcctctgtggttattaaggggattaaaaaaagaaaaagaatgaaatgtaaacagttttataatgtaactgtttttattatcactggctatagtaaaatagagataatgtcctctctgacataggagctgaggactagagacttggcaagaaagccaaagcaagcctggaacccaagtttttggagctttgtggtgctcttgtttatttaattttaattttgttttatttatttatttctttttttttgagatggagtcttgctgtgtcatccaggctggagtgcagtggcacgatctcagctcactgcaatgtctgcctcccaagttcaagcgattctcctgcctcaacctcctgagtagttaggattacaggtgtccatcaccatgcctggcttatttttgtgtttttagtagagatggagtttcaccatgttggccaggctggtctcgaactcctgatctcaggtggtctgcttgccttggcctcccaaagtgctgggattacaggcgtgaaccactgcacccagccttatttatttatttatttatttagaggcaaggtcttcttcttgtcacccaggcgggagtgcagtggcatgatcaagactcattgcagccttgacctcctgggctcaagtgatcctcctgcctcattttttaatttttttgtagagatggggtctcactatgttgcccaagctggtcttgaactcctaggctcaagtgatcctcctgtctcagcctctcaaagtgctgggattacaggtgtgagcctctttgcccagccttatttatttatttaaattgtatgagcaaggtctttggggacatgaccctcagtcgtgccaaccctgctctctaggagcagagaagtgaaatgtgagtgaggaacattgagcatcaatgggacaggtgaagtggagagaaagatgctcatacctgaaggagatggggagcagtgctgaaccagaccttgaaagataggaggatatgggctagggaggtggggacgttgagggtatagcagaggaaaaactttatgcctctaccctgcttgattcagtagctaggtgccctgagaaacaaactgataaaaaacattaacaagagaaaaatcagttttaattatgtaagtaggcactggcaatcacaaagaaataagagtcaaagaggcaagtagaatttggcgggttctgtgtcatcccaaagggcaacaaagtatggagaaaaggtgagacaaaggaaaacgggtttgggattcctgctggggagtaagttatgggaaggcaacttggaaacgtgggatactcaagacatgtttaataaggtgtgcagattcaagtgggtgccttgtccatagataagagattgtacaggagacggagacacccttccaaatgtaaatttctttacaaaaggaaaatttatgctccgtttttagagcttttccggcatctgctgttcttcagttgcttctgctcaaaataatccttatgtcaaagaggcatattttgtttgtaggggtgggagtctggtccgcttcataggtgagctaaggcagtagcattatgtgggcagaagttagcagcttgttttgtctgtttgaggtgtggtgggaagccaggctggaagcagaggctgcaggggagatgcaggatgtggaagccaagaaaatatagagctcccatcttgaaaataaggggcaccctttagatcagtgctatccagtgaagctttttgtaatgcagtaaatgttctattctctgctgtcaaatacggtagccactggtcacatatggctgtggagcacttgagatatggctagtgtgactggtttttaaactttaattttaatccatttaaatgtaaacataaatagtcccagtggcttgtggccactctttggacaacacagggtagagctttgggaagatgacttctatggagtatgtcaagtagatgtgagcaggagacagagaatgatgtgcctccgccctgcaagaggtgattgaccctcccctccactggtcttcctgtccagtgttcctggagatggatcaggaactcactctctgcttccctgctgtgggtcccagtgtctagtctgtgcctttgatacggcacacacatctgttacttaactgcctttcacacctccagctccaggctccatgtccagcctggcccagccctctccatcccttggttggcacagggattcccaggctttcttgccggtctttgggggttgtgttttgctttgacttttggagaaactacactctcagggaagatgccctttggcccatctctgcctttaaccgtgaagtgaaggcagatgtgcatgagttttcagaattctctcacacccttgcagcaggaggggaggaaagaagagattgggagagggatatcgtgaagagtgtctaaacccagagaaatggggtgacatgaagagtctagggtggtcctgtgttcaaaatttcatgtcttacacagcagccagcccgaaggggctcccactggcctaatatggggcaatttgaacatcaaaataaataatagtagtcaaggattatgacttatagaataaaggaagaatccgtgagtctatactgataaaaataaatgaatgactaaataacgggagggaagaaaaagttattacaataaaaagccaactaataagtgttggaatgatggaattagaaattagaaattcaccactttcccatccatccacataaatgactaagacaagacttattaaaactggtggtctcaaagtatatcaccatgaaatatatcaccatgaaacactgttgaataacaaagggaaaaataatagcttcacagtgaggaaaccaaatgatcaaagtaaacattgggctttaaaaactggagctttaaaaattaccgatgggggccgggttctgtggctcatgcccgttcataatcccaacactttgggaggccgaggcgagtggatcagttgaggtcaggagtttgagaccagcttgactaacatggtgaaaccccatctttactaaaaatacaaaattagccaggcgtggtggcgggcgcctgtaatccagttacttgggaggctgaggcaggagaatagtttgaacccaggaggcggaggttgcagcaagcagagatcgcaccactgcactccagcctgggagagagagtgagactctgtctggaaaaaaaaaaaaaattactgatgggaccaggcatggtggctcacacctgtaatcccagcactttgggaggctgaagtgggtggattgcttgagcccaggagtttgagaccagcctggacaacatagtgagaccctgtctctacaaaaaataaaaaaattagcgaggcatggtggcatgtgcctgtggtgccaactacttaggaggctgaggcgggaagatcccttgagcctagaggtcgaggctgcagtgagccatgatcatactactgcagtccagcctgggcaacagaatgagaccctgtctcaaaaaaaaaaaaaaaaaaaaaaaaaaaaaaaaggttaacattggcagtagtgggaccgctccacagcagacgcctcctgagaagatgcactgaagagaaagtaacaccacttctgtgttttcttgccgaaagttcataaacagaatctaatcataagaaaacaccaggaatacccaaagtgagggaccttctacaaaatagttggcctgtattgttcaaaaaatctgttttgaaatatgaagactcagaaattgttccagattaaagaagactcaagagacctggccgttgaataaaacacatgatcttggatttcttttgccataaaggatgttattgggacaactgaagggaatctcaataagatctatgggttacaaaatagtagtgtttcagtgttgagaaagagaaagtaaatgtagtaaatgttaccatttggggaatctttttgtactatccaggagttttctgtcctattcttgtaacttttctgtaaatctgaactgtgtaccccccaaaaacaaaatattcattgttcatttctgatggaggcataccggcattcactgtagtgttctttattctgtatattttaaatatttttataattaaaggttggggaaaagtaatgaagtcatgttctaaatattgtgtaatatatagagtcttggacatcatttagaatatctaagtctctgtatgtttcataatagcgatactctagatttgaattaaaagatgagtataaataaatttattatgagtaaagtcacttgatagtatttttgaattggtgaaattagcttttgttttcctttatatacactgtggccggcacaatatcctactcatcttatcgtcaatctgatacttgctgaatgaatcatgcacaaggtggaggttcttcctctctcctgccttctcaggggttcagaataaccatttgtgtcattcacaacaccttatagatgtgcccactgtcatctgaattgaattagtctaatccgataaagcttattaatattaaataagtattttttgagtgtgtttatatttaaagcttatgcagtatttcaaaatggaatgttgaactccctgcctgaatttctacaccttttttttggctaagaacacatctttaacatggtaaaatacagctctaattttcaagttctaaaaaattaaccagaggtctgggcgtggtggttcacgcctgtaatcccagcactttgggaggctgaggcatgcggatcatgaggtcaggagattgagaccatcctggtgaacacggtgaaaccccgtctccacaaaaaatacaaaaaaaaaaaaaaaaaaaaaattagccaggtgtggtggcaggtacctgtagtcccagctactcgggagactgaggcaggagaatggtgtgaacccgggaggcggagcttgcagtgagccgagatcgtgccactgcactccagcctgggcgacaaagcaagactctgtctcaaaaataataataataataataataataataataataataataattagaggatgcatatgtccttagacttttaaataaaatctttattatctctggttttctatttagaggcacttgtacatgatgtcatattagtctttatggaggtagtaattcaatttagctgacatttttagccacctgagcagaattctcggccctaaggattcaaagacgaatgagatatggttcccgaacttgtgtagaaaattgttttatgaagaccttgcccctgctaaaatctctcttggctacctgggggaggcagcctgttcgggaggttggaatgagtgtcctggtgtagctgttaggagcaggagacctgcacagtgtagctgggagatggctgaagcacagagattacagaatgagctgtgattctccgagacgctagcacccggggctgcctttcactgggtttgatggaagaacctgccgttctcactgttgcaggcaaaatcaaatggtatagaggaattgatatcaaggtgtgcaattaaactgtggcttctttctgcaggcaactttgcaagctattaggctttagatttttttcttaccttgttctagcaattagagagatctttataaatttggctgtggaaacacagatttagggtaagagcaggattttatgaaatgtagattgataaagagaaaatggaggttattatcaaagaaggactgggatgaattaagtttaacgaggtaatggtcactgcatttttttcccttttgctagaaatcagaatgatcccttccttcctctgctcagcgctgtcaggcagttgtcacagtcagatttgtctccacatcttaagcccgcccacaggaagtctctcatctgggggtgttgggcagtgcttcagcaggacaattcctccgccagcgccccacctttaaacaggtgtgcctgctcaaggcttagttgatgttgccccatgcagttgctgtgagacttctaggaagctaccactcctcattgctgctgggggaggaaaggtggagagggtctaggaggccgagagcttgctgagatcctgtaccttcctgcagggctttcctctgaatctcctgcgcctagcagggcattcccaccccgccaagtgctccaccccgccccgcccctcctccaggctcataggagccacccccttccgggtcctgcccgggtgatgctgggccaggagctttgtgtacacccctccacttcagctgagccagggcatgtctgcggcccaggccagggcgcagtgtgtgccctgggggcccaggcctgcatggctcctctgggtagggggtcgggggcacccccaaggatggtcccttagggtgatgttttggctttggggtgacttcagcaatgtccctgcgagacaagggcggggaagaagaatgttttgaatacgactgccaggatgaagagaggaagccaacccacaggcagcatgacacccaggacctcttggaagagggtaaattctgtacttggctcagatttgatcctttccttgttagtatctaaataggcttgaatgttttgctgatttcatagcactgttttgtttttttttttttttaagttgaggtataagttagagatcttatgcaaatggcttaaaggtgtccttgtaagagcccccaccccctcacccagagaacagcatttccagctcctcaggaagtcccttggtccctttctagtttacatctaccttcccagaaacaattattatgacttctgtcaccttagatttgttttgccacttcccgatctttgtaatggaatcaaacagggtgtattcctttgtgtctggcttttgttgcttaactgaggtctttgaaattcatccttgttgttgctaatatcactaatttttttttgtgcatggcattccagcattctgttttaagagattcagttgttatcttgtgactggttgggttttgataagttaatggacaagagaccagtcttattaaatgaagcatgtttttgttctggcagtgtttatttttaaaaaaattattaatcacttatctgaaataaagattttttaaatcttagaaatatttcaaaatgaatagcccaaggctgacattgaaatctgggagcccactgccggctctcttaaagagatgctcctttgcagggaaaagggaggatgttaggtaaagataggcccagatgctggtatgagctttctagttggccttccagggctttcacccacagcccagagaaaggagctttgggggctgatcaggatgtttaaacaatgactaatgttctttaggtcccttgagtaaaaacaatcagaatatgtttcaaacttctgctttaggatggtctattttcctgtcttgggataacttttttcttttttcttttttttgggacggggtctcactctgttgcccaggctgcggtgcagcagtgttatcctggctcacggcagccttgaccttctgggctcaagcgatcctcccacctcagcctccctagtagtgagtagcagggcccacaggcacacaccaacttgcccagctaatttttaaaattttttggtagagacaggatctcactaagttgcccaggctggaacttttgttttcaacattatttataatcagccatatactgaaagtatttttcttttgaagttactgttctaaaaatatggttaacacttcccctccaggacagctgcaaatattttattgcaggaagggaagaaactgggagaagccaggggagggtgagggacccaatgctgaggcctgcattctggctggtgcctttctggccttgtcttgaaggagatgggggaggggagaggagtgacgggattgaggatttgttaggtccctggaagggatcaggagaaaggtatccatctgcccttgtagaactagggctcccccagatttagctggattagcttcctgcccctttaatctctgctgcttcaagtgcagccagtgccctcatcacctgtgagcttgctagaaatgcagaaccttaggccccagcccagacccactgagtcagcatctgccttgtaacaagatgtccagatgatgggcacgcatgttaaagtatgagatgagctgctgccttaaagcctagcaagattttaaaaataccagtcattgaactgtatgattctagattaaaggctataaaatattctggagcagtatcatatatcctagtcaagagaggaaaaaaatttgtgttgtgcccatttcatgtatataatgtatataaatatgtgctgatatataaacatataaatatatattatatataaatatatgacgagagagagaccctctctttctctctctcattatatattttgtcaactaagtgaaataacaggcactagaacttagagaaatcacagtttattctgatccaggcttgaggacttgagcccaggaacacaggctcagtatagaccgagaatgtgtcctgaagtagacggcttgagacaccgtagataatgcattttctaatagggggatacgtgtgacacagaaggtgggggaagaggatagtgaagcaacagttcctttcctgtaattctgtttggtgcacagcgatgctgtacataaggtaaatatgcagttgagcagtagggagaaagtttaggtatctcaggggtctggtggagggtgactgattttgtcaatcctgccttttgttctacatctgataaacaggtttctgaccagttcctgtcagcaaaatatttgacaaactctggttatacaggcaagaggtcagctttagtttataggcctaggtcttattaccctcgtgctcatctgcagccatcaggggccactgttaaatttttcgttagaaattttcttttcctgaaaatttatgtagatacatgtattaaacttttttaaaaaaccaagagccagatgatgatgatagtgaatgtcattatgcacttcctaagtacttggcaccattttcagtgatgttaaatctctgctgcttcaagtgcagccagtgcctttatgtggattcatgcattgaacctttaaaacattcgaggtcaaatactgttattattcccattttataggtttatgggaggaaatgtgaacaacttgtctaaagtcacacagtgagttaagtggtcccagcctatttagaatggctgtagaactctctgctcttaactatgatgctagcagttctcaaagtggggtccctgaccagcagcatcaggatcacctaggaacttgttagaaatgcaccttcttggaggccaggcatggtggctcacacctgtaatcccagcactttgggaggctgaggcgggtggatcatgaggtcaggagttcaagaccagcctggccaagatggtgaacccctgtctctactaaaaatgcaaaaattagctgggcatggtggcgggcgcctgtagtcccagctactcgggaggctgaggcagggaattgcttgaacctgggaggcggagcttgcagtgagccaagatcgcgccactgcactccagcctgggcggcagagcgagactccatctcaaagaaaaaaaaaaaaaaaggcatggaccttcttgggtcccactccagacctactgaatcagaaactggggtgggaccaagcaagctgggttttaacacgccctctgggtgattctaatgcacattgtcctgtgctaatccacacctcatagataacagtgtatctgccttataatcggattcaagggaagagattttgccttgtatttgtcatcttatgatagataattactgtctgttctctccttctcttgtttgtttctatccagttttccctcatactccaagaaatcatttttagcagtcctgtaggtgaggtgttaacagtatttttaggacagtaacctcgaaagaaaaacacttgccaacatgcttcatttactttgtaaaatgaaacaaactcacttttaaggtttgctcctgacatgaaagaagcaaggctgtggtgcagatcagaaagatagcaacttagaaagtttggtgtcatggccagttttgctggaaacacgtgtatctcagagcaagctgggcaggaccccatttttctctgtcatgatcacaccacctttgtcctgagttcacaggaagccagtcccatgtggagcagaaatactctgtgagtagtgaaaatatgtgtgtggatttggatctaaccgtgttacctggatttcaaggtgtttctacattgtcaacttgcctaaaagaggtgcttttggttgaaatctgtaagatacaattagtatttcagttgctctgatagttacagatacaggatacatttgttgttctctccaggtcaccttatgggataataggcactttctcatgtcactcatttaatctttaaaacaaactttcaggtaaacattctcattttgcaagcaaagcacctgaggctcagatagtttgcacttgtgtagagtccctcagctcgaagcacagagctgggtctttgccctgccttgtggggttctgtgtttcaccatgcccaggctctaagctgacagagttctaggcccttcccttgtattatctcattgaatcctcttatcccatgaggtgggtgctcctgggagaccaggcagcaggagagggcttggctctcactgtctttccagggagaggaaatatccaggccctgggtcttctggctcctgaaaacttgcacaatgagaaagcaaaattgatctcaggtgcttagtgacatatttagaggagggctcttctgcttttcgcaatccctctcctcactatgagattaagagggctgaactgcatgaatgaaatagtgggtcccgccctgtctcagtgcctgggcagctgcatgaggaaaacactggtgaaaagagaagtttcatggtcacttccttgtggcctattacctggcaaatttccagtgttctttttcttttttctttttcttaaatgaaatgcatcaagaagcctgactttgtaatttcttctcatcaggttacttccaatcctattacccatttgcaaagtgaatcactaaatttctggcaaatggtattcaggattgctcaggagaaggcatgatttggatagagatgcacaatggtctggagtttgctgagtgttctcatgaccaggtttaggttccccgagaacacgggctgcaggagagagaatgcattccactttccttaggggtcgttgctaagagtatgtgagtgggcagagtcagtcttctgcacaaagggcagttttgaggtgttgaacactaaccagacatgatcatctggaaaaacgggtgaaaaaaatgccagtcagtggtgggaacccagagccttctgtgtctatgtccagtggctgcacctgctggctgttcaaattctccatctggttcccaggcgaagctggagattcagcacagatggagcacatttctccagcttgggagagcattcctgggctgcagagaaaggactgggccctgtgggggaataactggatccaggagtgccgtgtcttggaggtggttgtgatgcgtcaggcttttgtgggctgtggagttgggaatgtcagccccagagaaggggcctgagtcctgggcctttgttaatgtagtgtcatcggcagcactcgagggtgccgtgcacaactttcccgatgggtcagtgtcgaaggaggaactgacctggcgcatcagtacctaccgcagcactgttacaaaggtctcttggttcatggttttcattgtccttgtctccgcttgggatttggtcctcagtatccatggctaccccacgcaggcctcctgtggggtcagtctctctgggtggttctcctaatagtggggtaccagcatcaccccaaggctggccatggacaaagagcctactcacgttctctgtattttggggtccttttgccactctgcccatttctggggcctgtcccgtgtccctctgccatccccagctttcttgtatcatctgagctgcctagcagtgtctctcacctgacacctttcctgcttgctcctctgtgttatgccagtttatgcatgtgccctaccttctcaactaggtcaggaattcctcgagggtacgattcatttatttacttagcagacattgagagctccaacttaggggttagacagatcaggcccttccataatagctctgtgaccttgggcagtttctttctgtctaaaatgggacagtagtaatactttcctcataggatggatgtaaacgttaaaggaggtgacatacagacaactcttaacagagtgccaggctcatggtgagggtgccagagtgaaccatgtgtttattgccttattaaatgtcttggtgataaatggccactatagatcaacactgggtgttccagtctggggcagggtggctgattacagcatctagcaaacctgctccaagtccatggttgtgtctctctcgaccttggacgagccactggcctttctgtctggtttgttaaatgaggctcatatgtatgttgtgggcttcttctgagttttaagtgaaataatacttgtaaaatgcctaggaaagcagttggcacattgtagatacccagtagtagtatactcatttcatttattcttctctgcttcttaaataacttgtattggtgtcctgctcttagcctgcaaggcaagggaaagtgagccagtagaatagtcacactacaacttcattaatagtgatactgataagcaataaaaggaagccatagctgtgctgttttggcctctgtccttggcaagtggcaccatgctcctgcctcctagtgcagagactaggcaccacacagacatgggtaatggctgtacagaccattgttcgtacggctctgggtcggtctctgcccccactactgttccggccacaaggctgcctgcaaaaacaaagtgacacaaagaacaaggagatggggagttgctaagacagatgcattaaaaggatggcatcaattaagtggcgtagtcctaggccagaagcaaacgggcagactgctactgctcctcccaagtaagaggcgctggcttatcatgccccctcaggcctgtctggcgttcagatgacttgtggccgggatagactcaccaggactcatgctcatcttgagggcatgcactgtgcacccgagctttgtttttacccctctctggggtgtcgattagaaatgagctcttctttgcaagtagaacagagttttgttttgctttttgagtgtcaactgtggcccaaaatgagaaagactcagctgccttcatgtgacctaaacagcccaggtgggaagggacatttgtaagcatttgttgggtttgttctgcctgccctgctgtaaccatttttgacacgaggacactgagataagaataaaaagaaattgttctttctttttattgtaattgctgagaaatgagcattgttttctattaccaagtactgtgggccctcaccccgttccagtggccacttcaaagtcttcatcaaaatagctacattttgttttgtttttaaaaccaagtaatgggccaggcacggtggctcacgcctgtaatcccagcactttgggaggccgaggcgggtggatcacgaggtcaggagatcgagaccatcctggctaacatgatgaaaccctgtctctactaaaaatacaaaaaattagctgggcgtggtggtgggcacctgtggtcccagctactcgggaggctgaggcaggagaatggcatgaacccgtgaggcagagcttgcagtgagctgagatcacgccactgcactccagcctgggcgtcacagccgacactccatctcaaaaacaacagcaacaacaacaaaaaaaccaagtaatgtgtgtcttagggcttagtagttaattcactaggactatttggtcaagtctaaattactgagggtcaacaggcaagtgagagacttggcgaagccttcaaggaggtggctataacttgggagaagatagaagaggtttatgcctaggaaaagagttcaaagtcaaattcttctcagttatggctgtatcatgaaattatttctgtgatctgactaaattttatttaataacaattttctaattttaaaatagtctagtctaagtggggcagattagtacctttatgtgctgtttatcagtgctagtttcttagtgggtgatttgccatttctaaacaattttgctatgtgataacatcattgtggacccaaggaagtccaagtcaagggttgagacaatacaataatgtttttacattgtcatgtaacagggaagtggctggaatatggcatggttcggggatgcttgcttgagtgtcatttatttggtaacttaaatatcacccattttaactagacaattcaaagattttcgttaaattcactgagttgtgcaaccatcaccataattcagttttagaactttgcattcccccagcaaagatcctttgtgcttgtttacagttagctcccatttcccacttctgatccttggcaaccactaatctgctttctttttttttgagacagagtcttcactctgttacctaggctggagtgcagtggcacaatcttggctcactgcaacctccacctcctgggctcacccacctcagcctcctgggtagctaggactataggcatgccaccacatctggctaatgtttttattttttgtagagatggggatttgctatattgtccaggctggtctcaaactcttgggctcaagtgatctactttttaaaaattgttgttattttttgagatggagtctcactctgtcacccaggctggagtgttttggcgagatctcagctcactgcatcctccgcctcctgggttcaagtgattctcctgcctcagcctcctgagtagctgggactacaggtgcatgccaccacacctgcctaatttttgtattatttttagtagagatgggtttcaccatgttggccatgctagtcttgaactcctgacctcaaatgatctgcccaccttggcctcccaaagtgctgggattacaggcatgaaccactgtgcccagcccaatgaggaaacttttaaaaaataatttgtcatttttgcttttagcaaatcaccctcacggcgcagaggagtgggaagaaggtgatgccttggaatgggccccttcggctcctgtcttcctcagaaccatgccgtctcagctgtttcctnnnnnnnnnnnnnnnnnnnncttttcttatccattatatgaagggaatcatacaatatgtggtattttcgggggtttttttttctgagcataaggattttgggttcatactatagcatgcatgaacttcattcctttttatgactcaatattccattgtatggacatacctactgtgtttattcattcaccaattgatggacttttttggctataatgaatgatgctgctatgaatgcttatatacatatgtttatgtttgtgtgtgcatatatggttccatttatcttgagtagatacttaggagactttaaaaagtcttcgtgaccttaggcaattcacctgacttctcagagcctcagtttccctgtcatataaaatgtggtgatacagctactagggaggctgaggcaggagaatcacttgaacctgggaggcagaggttgcagtgagctgagatcgcgccattgcactccagcctgagcaacaagagcaaaactccatctcaaaaaaaaaaaaaaagtggggataaaagtataagttactctcagcactgtatctggcagagataagtgggcattgctgctgtaagctgagtcacaacagccatttgaagatgttcccctgatcaaaagtgctttgccaaatcagcctggtctaggtgtctgggcagactgtaaaaactacagattttacaaaagtgggcagaagagctgacacttggatagggtgtcagctacagggaggcaccttctttttggcctgtgggaagagcaggaaattcccagatggagaagtgagagaaagacagtccgtacgagaaggaaatggcaggcacacaagtgcgaggccagacatctgagagtggcatcactgggtgtggaggagctatggtgaagagtgagcttgggtggcaggggacgaggcgggagggttgggctgggccaggtagggatggtccctgtatgtcctgtgtgttgaggctgctgcttgtaggaggtagaagagctggggaagattattaagcagagcagggactaattaagttcaaaagctacaagcttttaacaaacctttaaaggacatctattttgtaatgcctggaaacttggatgactggtgactcatttagaattttatggaaagctttttagttcccaggttctgggaccccaggttggctcccaggttctgaacctctgtcccctgcccctgtgaacagtgcagacagtaagtgcttattaagtttacttcctggggcatcaggtgccaaatgtagtattgctttttcatcctgacagctgctgctgctatcaaaagcgagaggtaatcaactggtttgtggaccattcttttctttggcacctaagtaccagctctgtttcaactgggtatatcagaattgctagggatacgtgtctactttgaatgtttattcaatccctttgcagtttttataatgaaaattatagaaaattgacttttaaaaacactgatgctaaggtgtagaagataggaggaaaaattattgaggggagggtggagctcagtttcttgataaaactttgggaaacactgttttaattaaagaaatgacctatatgtaaggcagaatgcaaacagccccaaatgcaaatatatcaggcagtcttgaatatctttttttttttttttttgagacagagtctcgctctgtcgcccaggctggagtgcagtggcatgatctcggcttactgcaagctccgcctcctgggttcacaccattctcctgcctcagcctccccagtggctgggactacaggtgcctgccaccacaccctgctaattttttttttgtatttttagtagagacgggatttcaccgtggtcttgatctcctgacctcatgatccgcctgcctcggcctcccaaagtgctgggattacaggcgtgagccaccgcgcctggccctgaatatcttttctacccgttgctacttggtgtttgagttataagtgtcttcttgagggtttgggaggtttttctttttatatgtacacacatatgtacatgtgtgtgtaaaatattcatttattcatgccagagatatgtagagctgacatcaatgggaggaatgttaccagaattaggttaagtagtgatgagagttattcgttctaacaacgttatgagaatcttttcctccaaaatacatgaatgggaagtgaggttttctaactatattttcttaaagaagactgataagaccaaaatgtcaagaaagcttttatcaagcttgttaatttgacacacaccatagagacacagggtcccttggggagggcaggttgctgtgatggaactgtagagattctccctacccacccctcgggttaggcctctaggttctgccttctgcctgggtcttagatcttttgctccagccccaccactccctgagctctgctccttcccacttctcccggctcattcagaagccctggacagtgtcaagatagaaaccccaatgccacaccacctttgttttcttcccatggggttttcctcggggtcttcaattccagtcactcctgagcttcccactggccagatctccttggcatcaggcaggggcatgtttctgttctcttctgggcctgcacaccgtatgtttggggttttttggctggcatctcctggatgctggaagatgggtgccaacatttattcttaaaattgttttgagcatggtttaacttagcataaaggctgctttacttgttttcagactaaggcactccatggagctcactccacctccatcccccctctccgtccccattagctgtgacagcccagtcatatgtctccctctctctgatcagccagcccagggctcctcgtttgaatttggcttcgtaattccttactttacttggcatcccaagaagaaggacttgattctcctcttatctcaaagtggattctcccaaaccaaaaatctccctcctccagctcctaggagggtgtttctgtcaggcagacctcctgccactgtgggttgtgggcagccctctgcctggcacattattacacagtgacatcaactactgtcccagtgccagtggtttcttgggggcaccgcatcttgcctctgactttccatctcatgcccatctcgaaaggggacatcactcttgtccttgttgtcccagtgagaagccctgatcagtgctttttgatttacctcccactcagttttagttcttaaatctcaggataagagcccactccttgccacctacaatttccttgcattaatccaacagcctcaatgcttgtcaatctaaattgccttgcaccccctcccccattgctgcacactggagccaaaatgcttctgaaatataaaccttattgcataaccccccttcaaaaactctctagtggttttccatttaattccacccttcttaaagctacttgtcaggcttcgaaccccctgagccccatcctccaggctgccctgttttctgtgtgccccaggagggcaggtgtcctgccttgttcagtgcagagcttggtgcgtggtaatggttgtttggtgttagtcagaggtgaggcgtgtgtattttactatggtgggtaggcagcaagttgcatttaacttctttttctaggagatggaccataattttcttatattaaattatcatagagactgagcacggtggctcatgcctgtaatgccagcactttgggaggccgaggcaggtggatcacctgaggtcaggagttcgagaccagcctggccaacctggtgaaaccccatctctactaaaaatacactaattagctgggcatagtggcaggcacctgtaatcccagctacttgggaggctgaggtgggagaatcgcttgaaccagggaggccgaggttgcagtgagccaagattgcgccatggtactccagcctgggcgacagagcgagactctgtctctaacaaaagaaaaaaaaattatcgtagaggtttatggtggctcctttattttgcttttctttcttttttgaaacatcttttgggtggaagtggatttatttggtagcactccttgggtcagaaatggaacttctctttgaaatacattcttatagagagagaaacttgaccacggttgattgaagatttagtgcctaggaagttggtatttgaaaagcataacctgtgtttatgctgtctgaaggcatggtttattattttttcaccttcattggtctcactcttgcttccttatttcttggaacaggaaatctaaaacctagaagttagttggtggctgctcagagccccttggcttggatagagtctcctgagaaaacctaagcctctgaacccaaggtcagggttctttctttcccctaggcccaaatgctgctcgctctgtttacacacttcctacacatcgatggtttgtgccttgctctcgtgtcctttatggtcttccgttttagtacaggagccagactggcctcggtgcagtctctgcaatgcagcctcattctctgtgacctcagtggggtccttaacatccagattcttaatgtctcagagcctcagttttcttatctgtggagtagtcatcgcgactaccctgcagggttgttgtgaagattaattgagaaagcatgttaaatcccttgacatgataggggcaccatcggtgttagctgctacctctaccgagagtctgttattttgacatttgccacctgctagctgtgtgacattgggtgagttattcagcgtctctgggccttagttttctgttgtaaaatggtgttaatataagtgcttaccccttatagtattgctctgaagattacataaaataatccatatagagggttatgaatggtgcctggccatggtcactgtgcttagtaaaggtcagctcactgcaacctccacctcccgggtccaagcaattctcctgcctcagcctcccaagttaggattacaggcatctgccaccacggctggctaatttttgtgtttttagtagagacaggtgtgcattttattgggttcaatttttaaaatattttaaagctttataaaatagcaacacaaggggtccttgtaagtggtagatacatgaaccaacacaggtaataaaattacatagagcttaatacacacatgtgcacacaaataagtgcaagtaaaacgggaactctgaggaaaagttatggattgtatcagtgctgatatcctggttgggatattatgatcttgcagaatgttaccattgggggaactggataaagggtatacaggatccctctgtattatttcttcaagatggagtcctgccctgctgcccaggctggagtgcagtggcacgacttctgcctcccgggttcaagtgattctcctgcctcagcctcccgagtagctgggactacaggtgtgtgccaccacacctggctaatttttgtgtgtatatatatatatacacacaaaatttttatatatatgcaaaattatatatatacaaaaatatatataaaattttatatatatacaaaaattttttttttagtggagacagggttttgccatgttgcccaggctagtctcgaatttctaacctcaagtggtccatctgccttggcctcgcaaagtgctgggataacagccattagccacctcacccggccccctctgtgttatttcttctgtctgcttgtggttatctacacatgactgactatctgaataattacagttaccttaattcaaaaacttagccttaaaaatttgagtgttatctctaaataatatagtgttagagaaatagcagctctgaatcttcttgtacagataatagagccaggttagttaaaaggtagcccagttttctttttttccaggaaggcagaggactcagttttttgaggagagtgggcgccggtgagtggggataagcaggccctcaagtgacaacacaaatttaaacacagagaccacttagttgctgtggtctgttacctggtgtataaagggtgctgcagatgctttggcgtgctggctggggggccccagggtttgtatctgcacgcctgcagaccatcacagctgtgcgtgaagaagactaactcgggttggtagcataggagtcttcacttaagcacttgtgtgacctcgagctgatggactatctagagcaatttgagctggacttcatctacatcaaattagatcctggtttaaagctacccttataaatctcccttgcttctccctccctggcagctctgtctgaggcagcatatttccccccacgcttggacaggagggatctcatgaaagtgttgggtggaggggtcttgtctgctggctctggtggcactgtcttggtagggtttcagatttagaaccagatttcaggtctcctccctaagttagaaaatcattccaacagatccgatttctctgagctaatttactaggatgatctctacttgcatttaataaaatattcagagacctattgaattccagttgctgtttgccatttgtaatgctgctgagtttgacttagtaatacacttcaattcccaaatgtgtcgcatgggctgttactgaatgtgggtcattaggaaagctttgactcttaacagaattattcactgaagtcttagttacaaagcattactaagaagttatttatttagtcccaaagtgacaggtttcaaaaaattttgcacgttggctggccataaatccatttatattcactcctcccccaatagaataaaacttacgctaccttcttggtgtttgttgagcagcgaatcagttccttgtcactgatttaaaataaaacaaccctgatgtatctttagcagacaaaagcgttcttttgtttcacaacccatttctccaacggaagaagaacaaagacccatagtcctaaagtgcttgtgtgcagccttgtatgaccacagtaaattgtacatgtaatgaaatattactctgtgtgtgtgtgtgtgcaatcatagtagtctttttaatgtatatttaaaaaataacaacctagttttcatggtatggagctggttgcataaccttagaatgtaggccacttgaggaggagggggctatgccattatgaaattatcagtttaagactattgtttaataattatgccaacagctgctttctgaaggatcccagtctgttcgtatggttgggtctgtatggttagtggagtctaaatcctacaggcctttctgatcattcacacatgggtggctgtgctactggcccccaccccacctacttcagtttgctgaatatctgtgaggccagacccccttccactccattgcttcaccctcagcacatgctcatacacacagacacacaatgtcaaggtttcacaggggttacgagtccccctacccccagactcatcctccagtcgttggaactgggaaatgaagtctggtggtggtgagtacattgcgggttgaacccagcgagccagtgaccctctgtgtctaatgtgcaggcacaacattaggggcacttttttagatgagtcatttgtttggcaggtttgtgacattgggagtctcattgtcatttttatttcttacagttttatgtgctgaaagagttggccagatgactaagacatataatgacatagatgctgtcactcggcttcttgaggaggtaagtgctccaggggaaggcaaaagagttgtttataattgactggttttcatggatactgattaaagcatgccttatcacctgtttcagtgaggaatcttggaaattggtctctttcgaggtataatttaatggctttactttttgaactagtagctatgtaggcctttatagctgtaattgtgtgcagatattttaaaggaatatattaatggcaccaaatgtggtgtgtttaaatacttgttagaatatccagttgtaagtataaaaaatcctgaaacattgactaatgatatattttaagtgcatccaaaaaatgtcagaaaaatatatcatatctgtgtcttcctaatgtatttaagtttttacttaggctagtggaatattgtgcagtgtcagcgtggaaataagtaaaataagcatggcaagaaaaatttaagaaagttgcttaagattaggtgagctgcctgtattttagagactgtagttttctgaatttctcggtattctgttgcaattgagaattaagtattatgaaggtctctagaaacagatgagtataatatgtgtatgtgcatgcctggaacaggccagaacatggtgggttcttagtatttgttgaataagtctccatcattaatgcactgcccccttcactgaatcaggccttaaatggacaggtgctgccttctagacccttgcttctgatctggaatctggaatgattttggggcgtgtgactatgatgtggaggacacagaaatcattgttactgttttcagccagtgggaggtcagggttgaagctcacacagaaactgggccagactcgtttcccagaggtttttctggagtgtgtggcattcttccaccgtttttgtgtgtctctcttcccatgtctctaccgctgcacatccagcattctcttcctggtcctgccatccactcctgtttgatcctctgacgtggggaagtcacaaactcatcagctccccagaagtgatgtcagggtttttggctatgtgacagggtgtcaagggcggtattttgggggaccgaccttcagccttcgggtgtcactccagttgcagctgtctttggtgttagccacgtggcaggctgccttggttggcaccaccgacttttgaaaatggttaatcactgacccctttctgctgcatctgtttcccccaacagtgctctccagatcttacaaagtgcttccggcacccgctcatcaccccgttcgggtcattgagtcttctgagaggggtcctaatctgtacctttatttttattccaaggccaccactcaagctcttggggcctcagcagtgagattgtagcttctctctgctttactcttccttgcagctgccaccgtccatgccctctgtgacccgctcaccctttctgtaaagctcctcgctgtgtagtcaaggccacccattgctcaaggtcctgaaccctcctcttcactgtcctgaaccttcactgtcactggggacatggctcctgctctcccgcccttggccctctatggcatttaactgcgttggttctttcctgcttctcagtcttgtgctgcagggcctgccggggacctttgaagatggccccaactccatccccaggtagtctgtgcccttgctgagccccaggcataggagtcaccccatagtcctgtttgttttgttcatccagctggatgaacaatttattttttattttttgtggaggtgggatctccttatattgcccaggctgatattaaactctgaggctcaaacagtcctcctggcctggtgcagtgtcttatgcctataaatcccagcactttgggaggccaagacaggtagatcacttgagcacaggagtttgagaccagccttgccaacatggccaaaccatgtgtctacaaaaaatacaaaaattagccaggtatggtggcctgtgcctgtaatcccagctactcgggaggctgaggtaggaggatcgcttgagctctggaggtggagattgccgtgcaccgagatcatgtcactgcactccacctgggcaccagagcgagactctgtctcaaaaaataaaacaaaacaaaacaaaattagaagcaaactacagccactgtttatttgaatctctcacatttttaaattaaaaaattctctcaccttgacctcccaaagtgctgggattataggcatgaaccaccgtacccagcctgttttatttttaaagggtcttcatggcaacagcgtctgtttatgtctttgtgttccatgtctaatgccattctgttcctgtcctgataagattcatgcctgagttactgcctttccttggaactaggagggtgtcctggttaaagtctaactgtcccagtcatgtggctgttgcactgtgcggtggttttcctgggctttggctctgtttcttctgttctcttgctatgatttccatgcctgccacaggcaggcaaatgggggatttgcacaggatcccaaagcacagccttccaccagcgtggagagttcgcttctggttttaaggggaagaggatgctgtggctcacctgggcttgctgctgtctggaatgcacctttgggcagagcttgcctcctcctcggttacagagagggtgattccactggccccttagtcatgctttttatcctgaaattggtgaatgagatgagtcagttgctaagtgtaggcggcaggctgtttggaatctctagtgggtgtgtcagtcagtgcaagagttcattggtaaaaaggggctgagactcaagttacagtcttttttaagtctatgcttttaaagcatagtgaggagagggagcaggcagttagaatgagctctaccttgcctcatttcttgggggaataaaggaactagttcttttaataccttatttccaagggcctaaattacttgtttgtggtctctttttctcattgtagtttaatccagtggccatcttctagctgttttcttgtttttatcctttttttttggtagggatggtgtctcactatgttgcccaggctggtcttaaactcctggccttctcaaactcctgattctcccaccttgggctcccaaagtgttgggattacagacataagctgccacgcccaacctgttttcttgtttttagaagtaaacattaatcatattttggctagagaaatgggaggtttttttcattcttataattctcaaagaaaaacccaaccagcttgttgcctcagtaaaattaaagagaaaaaactagagacactataataacgtttctgtttaaattttcattttatctataaatatttttaatgtaactttttattttcaattttttaagtacatagtaggtatatatatttatggggtacatgagatactttgctaaaggcatatgctgcataataatcacatcagggtaaatagggtatcaggctgagcaacgtggctcacacctgtaatccagacactttgggaggctgaggtgggaggattgcttgaggccagaagtttgagaccagcctgggtagcatagtgagaccctgtctctacaaaaagttagacgctgtaactgaagaagaggaaaactttgcccaaacctgcattccaaaaattagataggcatggtggtgcatgcctgtggtcctagctactcagaaagtgaagtgggagggttgcttgagcccaggagtttgaggctatggtgagctgtaattgtgccactgcactccggcctaggcgatagagtgagacctgtctcaaaaaaaaaaaaaaaaaagaaaaaggaaaaaaaggtggagggtggagaaagaaagggatatcatcacttcaagcatgtatcattcctttgtgttacaaacattccaattatacttgtaggtatttttcaatgtgcaataaattattgttaattgtaaccaccctattgtgctatcagatactagatcttattctaagtatatttttatacaatttgctgtgacttcttgctttttcttctggcagagagtgttctttaaaattactctaaagattacatttctggtatagaccagggaagtgtttgtccttagtggggcaagaagaggcgaggcagcccttaggtgcagggtttgaggtgttacaggtaggacaaaggacttcattgttgagctcattgctctacttgtttctctttcccttcctgtctcccaattcctgttggtttctggccgtttgtgtgctggaagccttccgcatccttcaggtgctctggcagtcccttgccatgcctgagccatcttcattattatgctgtgtgcttgatttgtttgcattgaaatgtgcgtacaaaatgcggctaaaggccgggcgcagtggctcacgcctgtaatcccagcactttgggaggctgaggtgggcagattacttgaggtcaggagtccgatactagcctggcctacatggtgaaacgccatttctaccaaaaatacaaaaattagctgggcgaggtggcgtgtgcctgtagtcccagctacttgggaggctgaggcaggagaatcactagaacctaggtagcggaggttgcagtgagctgagatcatgccactgcactccagcctgggcgacagatcgagactccatatcaaaaacaaacaaaaaatgtggcgaaggcatgcaaaatatcagcgcttgttggaacttggcagcctggatgcatgaaggcaatgcagaccaggtagtcaggtagtgagctgaggagcactgatgaagcaactgctgagtgttcagtctgagaactagttctagtagagacattaggtagacttgagttagatttttggagactatacttccaaagagaagtgaacattggtattgcagttttaaccaaatccacctgaaaccacttggactaggtgctaattttcagtcagcctctggagactttaattctgtgcagtctccctcacacagttctttgaatcctttcctctaggtacctaataagcacagctgttgagtctgagaaatgacaaagggccatgaaataaggtacctttttttttttttttttcaattttgtgttttgagatggggtctcctgtgttgcccaggctggtcttgaactcctgtgctcaggagatcctcctgccttggccttccaaagtgctgggattacaggcatgagccactgcacccggccaagggaacttcttggtagacactgaccagtgtggataaatgtgcagagatgagcatctctgttgatggggcagatgcaccgtgtcccctttgccccgtgagagggccgtctccacatgtactgtgttcccagaaaggcaaggtcatgatggggaggcacaaattgtgggaacgagttgggggatttgcaactctctctttttttttttttttctttttttgagacagagtctctctcagacactcaggctgtagtgcagtggggtgagtgagccccgcctcctgggttcaagtgattctcctgcctcagcctcccgagtcgctgggattactggctcccgccaccacacccagccaatttttgtatttttagcagagacggggttttgccatgttggccaggctggtctcaaactcctgacctcaagtgatcccaaagtgccgggattacgggtgagagccactgtgcctggcctatttacagctcatttttgatactgtgatacctggctggcttgtgggactgtggtgacagcattgccagtttggggactgtggaaggcctggaggagagagaccatcatcctgcaagagggagccaaagtgctgttgaatccagtcttctcaaactgtacttgacctcaagtgctgcgctcatactgcagtgaagttcctgtggttagcaaagggagatgtctgctattgcatggaataattgggtggctatccaagacgttagaaataaaagctgatttttctctttattctaaaactcagtgaatcataaagctagagagtttttccagaatatctcagctagcctgcacctttactctaccttcatttaacagttgagggaacctatgttcaagtagggaacccatactctcccagtttacagtaggatagttcacctggagcagttcaatttgtgaccagtacctgctgtaagaaacacagcttaggttgtgacccagtactcatataggtgaatatgtgacaaacaacagtttaaacatgaaataatattcttattacatataatgcactttggtgttttcaattctgtgccattgtatttaagttaaaacaaaatgtcggttgctgttactaaaatggtttcttaacccactaatgagtttgaaacctgtggcctgaaaaatgaatctgttggcctggcgcagtggctcacacctgtaatcccagcattttgggaggtcgaggagggcgaatcacctgagatcaggagtttgagaccagtctggccaacgtggtgaaaccctgtctctactaaaaatacaaaaattagctgggtgtggtggcacatacctgtaatcccagctacccaaggggctgaggcaggagaattgcttgaacctgagaggtggaggttacagtgagccgagatcgtgctactgtatccaacctgggtgacagagtgagactctgtctaaaaaaaaaaaaaaaaaagaaagaaagaatcaatctgtagtgtactttatccctgtgaagcaaaagccgtttgcctgggaccgtgtgggtagttaatagcaggtgttggatcagaacctaggactcctccccagcatttttcctaccccaaacgacatgtttccattctttctttcaaaccagatgagcagagtaattagcatagacttctaaaatgatttaatttttctgacttctcctcaccttgccaaaacccaagttgaatctgactggtagcaactcgctaagtctgcatttgctgatggcgtctgtccactatcaggggacgtcttttttcccacagaggcttccctgactttatatgccactccaaattttcctctgtatactggctctgcctaattgatgccatcagctcagctaacagaaaattctgtgcccttaagagtgtttttgtctctgaaggatggcaattttatgcataacgtctccgttttgaaagttgtttttttcttaaatgaaacctaagtagccttttctaagtaaaaaaacagaaaagcatgtaattgtttttgagagtaactttaaacatttttgtttcacatgaggcaaaaataaggaattcaatgcattccagcctaatgtgtgctaaagaggctgcctccctgtgtcagctcttggcttcattgtcagagcattttagaatttctatatttattcattcattcacttaacaaatagctactgtttccctgtgccgggccctggcaatacaatagcccagccctcaggtggagagacaggttatcaagtgactgcacaaatatcaaaagcagttgcaaataattgtttttagaagcatttttttctttcctgtaggaacaaagatttgttttcattacattgtcaggcttccctttccttgtgtgatgtctgtgtagctctcacacactatgtgggcagaggttatgcctgttttaacaggcatcaaatgctaacacagatggtgaattattaattcctttgttatttctagatgcttatgttttcctcatttgacactgagcaccattgactccttcaggaaacacaggtcttttgaatccctgttctccctctttccttttgtagaaagagcgggatttagaattggccgctcgcatcggccagtcgttgttgaagaagaacaagaccctaaccgagaggaacgagctgctggaggagcaggtggaacacatcagggaggaggtaagacattggaggccgaggcttccagaggggcccgccacaggcctgggagctggaggcatggctgaaggagatgagagaatggagtcctagttggaaggacgctcccgagggcacgaccgcggcctgagcccagaactgtctcttctgaaacgttcacctggggactaaaagccaccttcctgcagctcctgctgctgcttgtgtctcttttctttcctcaggccatgtggatgggatggctaagggcgggcatggtcctcactcagtcgtacatctgtgtgccatgttgggccagccacagtccttgtcctcagagagtctagactctaacgatgcaggctgatcaagatgctccatgcttggcagaagggcacccaggctaacaccacaacgagcaggggttcctgagtcaggctgggcgtgggcagctggagaaggagccctgttaggaggccagctcgtgtacacagaggaaagtggcgactcacattcatcgttgtagtataattttgtgtgtgtaaaacaaaacaagacaaaaatagcctgttattttcatgatagaaaccctcttatttccatgatataaatcttggctgatggatatcaatggtgagaggaagggaatggagcttttcggcttatcttagggtatctaggtttagaaggaatgacgctgattttctggaagggacgtggtgtggacagaggagagcggctgtggagtcagatggggttgctagggcaagaataagaagcttagagccaggccctacgtagtagcttctttctatcactctgttcttctaacagttaattttaactgtgacaacacttctccttgtttcttttccccttttcttattcctttcttttttttttttttttgagatggaatttcgctcttgtcattcaggctggagtgcagtggtgcgatcccagctcactgcaacttccaccccccgagttcaagctattgtcctgcctcagcctcccgagtagctgggattacaggtgcccgccaccacacccagctaattttttaatatttttggtagagacggggtttcaccatgttggccaggttggtctcgaactcctgacctcaggtcatccgcccgcctcagcctcccaaagtgctgggattacaggcatgagccactgtgcccagcctttttttttttttttttttttttttttgagataaggtctcactctgtcactcaggctagagtgcagtcgtgagatcacagctcactgcagccttgacctcctggattcaagcgatcctcccacctcagcctcctgagtagctgggactacagacatgtgccaccatgcctggctaatttttgtgttttttatagagaagggtttcaccatgttgtccaggctggtctcaaactcctgggctcaagcaatccacccgccttggtctcccaaaatgctgggattacaggtgtgagcccctgcgcctggcctcttctcccttattttctatcagaaactttcttagtgggagtggatgcccttgttcatgttcctaagatgtattcaacctttttccttgttaaagctattcccagtacattgttgtctgggtttaacagtagttttaatatgatgaagcatagtcgccactatgtaagaaaagttttaatcctgggctttaagatttgataagggagaatgctgttgtattttaggagaaataaagtgattcgtgcattccctgcccccagagtcacgacctggattccctctcatgtgactggtgagaaagcatgctgggtcagcctggccccctcctagccacttctgagcagagggacatgccagccagtaactcacaaatggtcacccgtcagcttcttcactatactgttcttgcttgggacaagcctcaccttgcacaaagaggatccagctctctgggagtggaaatgccttttttcccccttggaaaagctttgaatttgaaagctatgaatgtttccctttggcatattattaaattatcagtctaggtgtcgaagctaaaacttttatgcacgtaaaattgtcttctccatggaagacgtaataattcactctgttttgtagaaaagttgcaataaaccatagaccctaagtcaaattataaacaagaaagagttaaaacgtaactgcaattcttcttatagcactggttccctattcttcagtactgcagagtgaaagggcagatgaaaacttttacagtccaactttatttaaaaaccttaagtacaaatcagggtgatttgcaaagccatctcagcagaagtcaatgtagccattccctgatggttggctcttttcttcctgtgtgtgaaattcctatctagtaagcattgagcacggaacgaggtctggctgggcttgtccaggagccttgtgagggtgcatcacagaatggggctgtgtgatcatccaagtgtgagagcaagggtcggtgagctgcctgtattgcccgtgcagagctggcatctccaggaccctatttggagttgggatttggttctggcagaagtgaatgaatggccttttctttcatttagtaacatgatcaatttttctggctatttgcccagctgatcatctggctatttccaaagcccctgaatagttgcatccccacaagcatcattcttttttcttttttttgagatggagttttgctctgttgcccaggctggagtgcagtggtgtgatctcagctcactacaacccctgcctcccgtgttcaagcaattctcctgcctcagcctcccgagtagctgggattacaggtacatgccaccactcttcgctaattttgtatttttagtagagacggggtttcaccatgttggtcaggctggtctcgaactcctgacttcagatgatctgcctgcctcggcctcccaaaatgctgggtttacaggtgccagccaccgtgcccggcccccaagcatcattctagtcccctctctgctcctccctataccaaagtaaaaattatgaatttagacagctttctaccaaaaagtaattgtgtttcttttaaatagattaaatgaaagcctctttttttgaatagcacaaaatcagtttaaatgctttcactttcaatggtgaattttcagaaaaatattgtccctaagtgttaagtgttggaatgtgagtcgggggggacagtatcaccttttgggaagcaaatgatgggcctgctctgcttgtgcaggtgtctcagctccggcatgagctgtccatgaaggatgagctgcttcagttctacaccagcgctgcggaggagagtgagcccgagtccgtttgctcaaccccgtaagtcaccagagggctgtatttctggaggccagagcacaggctggccgctgttgatgtccttggagtcacctagacagggtcaccttcagcagcaatggaggtcagctgctctcagccttctctggaccaaacacctccaagtgcctcaaacagattgattttactattttagcgggatatggatggacaggtttttagttttccttttcctgggtcttattgcttatttgtcaatttagattgatttgccctggcacattaatggataatgggttaggctctgctgttggagagtattcagggttctggagccagaggtgctgtggcaggtccttgggacagaaggcgtggtgtcttctctgagagtcagcagatcctcatgttgggagcatgaactccagagcccagtgggctggttgcagatcttggctctgggacttactagctgcatgctgttggctaggttacttaacctctgtacttgttttgtcatttgtaaaatggagataacagtagaacttaggtcacagagttataagcattaattgagttaaaacatacagagtacttacaaatgcattgtgagtattaaataaactcccagacatcctggaattgtgtaggctttaaacagagttggtcccctgaattctaaggtgatgtggcaagttgtggataaagggttgagatgtgggttcagaattggtggtgagcctgtgcactgggggcgctgtcttcctggggttgggagagccgtctggtgggtcattgtccttcctgcaagcccttctttgtgtctccacatggtttgccaggtggtgggaggaaatgcgtctccctaggttgtgagcgtactttctcccccaggttgaagaggaatgagtcgtcctcctcagtccagaattactttcatttggattctcttcaaaagaagctgaaagaccttgaagaggagaatgttgtacttcgatccgaggtgatgtgccctcccttctcttgcccctgctagaagggtggtggccccattcgccttatctggcaaggacaaccatggttaagtgccctcctcaaagctggcagtctgtgaagagctgtaccaggcgctcggcagatgtgcctcctctatgctctgggcactgccttccagcccaacacatgcctccctggctggggcaggcaaacctggtgaatgacatggtgtgtggactgggaagagttggagggcccctccttcacagtcactcctgcagtgaggtctcccatggtgttctccagctctgaccacagcacctgtggagaaacccagccttgttttcatgctgccacagatcagatgctcaaggaagtagtccatgggtgctcagagagagccatatttctttttctttttttctttttttttgagatggagtctcgctatgtcacccaggctggagtgcagtggtgcgatcttggctctgcaaccttcgcctcccaggttcaagctattctcctgtcttagcctcctgagtagctgggactacagacgcatgccaccatgcccagctaatttttgtatttttagtagagacgaggtttcaccatactggtcaggctggtcttgaactcctgacctcaggtgatccacctgcctcggcctcccaaagtgctggggttacaggcgtgagccaccgtgcctggcagagtcatatatttcttaaacaattaactcaaaaaggttgagctgaggcaacttggggactcatgcttttgagtttgttttattggcaaggcagtgtgccaggcattttgcccacattttttttttagagttcacagcagggctgaaagctcgttactttgattctcattggaacggtgggccccaggctgctaggtgttttgataacccgaggtcatttgagtgagtaaatgacaaagctaggatttgcaagtctgtgactctaagccccttgttttttgccttcacccactgcccctctctagaaacaccgatacgtgcaaatttagtactgtttgtcttaattagtggtgagtttctgttctctagccgaggtatggtgtggtacagtacggccctgtttatcaggcccctgtgtgtcaggttggagctgtgtgcccacctaggctggccctgggttcttgagagccccttaatagtgcagaccatctgtcaacttgaacttgcccacaccttggtaagatcttcatgtcccgtctgaacaagatgctcttctgcacatcttgttctgttagacctcacctcttccagcaccttgttcactgatgggtcatgtaaacccagattgaccaagaagtctgcctaggtttcctctgccagccagttgctgggcaaggcaacagccctgtgctccctattctgagttcagtgctacctcttccagcacctgccccaggtaaatgctccagccccgggcgcccagcaactcacccaaagctagctgagggaatctgatcccagctacagattcctgctaccccacatccattttctgaagtgtaatgattttctggggccaggactgagggctcagagacacttctgtctaactggggctcttgcttgcttgcttgctttgcctctttctctccctctttctctcctccctccctccctctctcccttcctccctccctccctccatgggagtcttgctctgtcacccacgctggagtacagtggcgtgatcttggctcaagcagccctcccatctcggcctcccaaagtgctgggattataggtgtgagccactgcgcctggtctcggggcttcttctttgggccttcagatctctatcatcccacccttttcagccagggcaagttgtccagagtcctggggtggctcttgtgcctctgcattttaatgcttttgtgttggaccttgttcttactaagcttgaacacagcaggtttaactccaacttgggacctcatatgttcagtgcctggcacatagtaagtgttagccattcctgtgtggttatccttaggatgcctgctgtgggtagtgtcctaggcactgtgcgggtcacagagcatccatatttatgagccaggacagccacaaataacagatacaatgataggatggtggtgttcgtggtgtttttaacagagcaagctgtagagcacctgtgcccgtagctgtgtgtggcgccctctagtggtatgcatttttcaggttttcagctttgagtgcacatccattattaagctgggaattcagatggactttctgtatttgagggtacgatgggtgacaggtgggggaatgctaagggcagcttcccagaccccagttagcctttgctttatgcctcagcccttgcctgcaccaccaggccaggtgagaatgtggggcctctgacctgggtcttgtctacaggccagccagctgaagacagagaccatcacctatgaggagaaggagcagcagctggtcaatgactgcgtgaaggagctgagtatgtccccgcactgctgtcttcttacttccttgcatctgctgtcatgattagacagatttgcgtcagccttgctaaagtgcagtctcctgccagcctacggctcagcagcatttttcttaaaactagaggcctccccaaccttgtgtggcaccccctctctattatttagtgctaagttgccagctatgtattatctcagtttatcactgaggtggatatttaaatttaattttggctttatactggaatattggaattttttttttttttttttttttttttttgagacagagtctcactctgtcacccaggctagagtacagtagttgcgatctcggctcactgcaacctctgcctcccgggttcaagtgattctgccagcttagcctctcaagtagctaggattacaggcacccaccatcatgcctggctatttttttgtatttttgtagaggcaaggtttcaccatgttggccaggctggtcttgaactcctgacctcaggtgatccacctgccttggcctcccaaagtgctgggattacaggcgtgagccaccacccctggccagaatattggaattttttaatgcctaagttaggcccagctacagaaaactgtgttgaaaatgtggaagaacagcttactaccagtaatttgatttgtggaagctgaagccagggttctcacctttgcaaataaatatttctctcctcctcttcattttaagtttacaagttaagaccaaaggtcaaaatactaagtatattgcatttcgtcaaaatactaagtattttgcatttcgtcaaagtactaagtattttgcatttcgtcaaagtactaagtattttgcatttcgtcaaagtaccaagtattttgcatttcgtcaaagtactattttgcatttcgtcaaagtactaagtattttgcatttcagcaaaataatgatgaaacacacctcatgttcaaatctagtcaagtgagttatgactctgaatatgggttgaaaactccaaggaaattgcactgtgcagtcagtagttcctttttagaactgggtgcagcaggggattcctgtttagtcacatgggttctcttgtgtggaatgtgaggatgtggctagatgcactcatgttttgtttgtcactttctatctgaccactggagccttcctgatttgttctggggagacagccttggttggtgggcttgggaccctacactgagctcaggagtgctatctaatggggtgagattctttttcataactgattgagccctgaagaagctgctttgcttctccatgtgggaaaatggtcattatgagttccttcctgcaccctccccactctaccctgtcttttagtaaggatggtttttcttgtgcaaaccacaaagaaaccattctctctgggtctgcatgtgtggttttctgacttcctctcctgattgttgcttctttgtcaaaggggatgccaatgtccagattgctagtatctcagaggaactggccaagaagacggaagatgctgcccgccagcaagaggagatcacacacctgctatcgcaaatagttgatttgcagaaaaaggcaaaagctgtaaggcttctctgtttatctggctgatacaacaatggccatgctgagacggggaagggaaatttactccagaagacagtgctctttagtttcatatcttagcagttcgtgttgccgctttgcagaaaaagcttagtggactcagtagtataaaactgattacctgaattggtgacgagtcttatttgtgacctcttatctcctaaaattatattgaattcattaaaaagatgttgtaaatatggacttttgcagtttaacttatggatcatctagtctagtatttgtttttacacagtgcactagatatgtgctgcagtagagcagtatcctcttcagatttaagaagaggcagcaaaatggactttgctattagtgtggggtaaaatgcttccagagagctttggaagatgggggtggggcggtgggctatagagaatgaatgtggatataggaaagactttaccttcaaaataatataaaaagcagaatttgagtataagatgagcatgtccttgtagaaagtgatgagttcattacagattaggttaataagagggaaaaagttggacttttaccaagtatcttaggaagtgatctatctttgccatgctttagtgcgcagtggaaaatgaagaacttgtccagcatctgggggctgctaaggatgcccagcggcagctcacagccgaggtgagcacctctccctcattccttcagtgcctctgattgcagccaaggtggattagccttcccggacagctttagtcacgtccatcgcaactactgtttttattttgaatttcatttcatttttattcgtgggagagtaaacccagttgcaccttggttctgtgcccactgacactgttactggttatgggcacctgtgtggcagggctctacaccagctgagcctggcacgtgcaggtgtccaaaaaatgttcaaagaaatgaaacaatacaacacagagcactctgggagaggaatctcacaggtgtggcttgaaacatgggtgtgacgattttctttttctttctctctttttctctttttgagatggggtctcattctgtcacccaggctggagtacagtggcatgagcatggctcaccgcagcctcgacctctccaggctcaggtgatcctcctgagtatctgggactacaggtgtgggctaccacacccacctaatttttgttttttttttttgaaagatgaggttttcccatgtcgcccaggctggtctcagcttctgtgcccaagcaaactgcctgccttgccctcccaaagtgctgagattacagctgtaagccatcattcctagcctgatttttcttttgcatgaagttggttttgtttcatttgcccattgttggtattttagaagatttctgagtctgtaagcttgcctcaagtcaaagaaaaagcaagcctttgaaaattctgttatttggccacaggcgcacagggcagctggttccacacgtgctggggactcttagattgctgtgtctttctggccttcggatgggcagatgtgtgtacacctgggtgctcaggagatcctgaccctctgtgtctttcctgcctgcagctgcgtgagctggaggacaagtacgcagagtgcatggagatgctgcatgaggcgcaggaggagctgaagaacctccggaacaaaaccatgcccaataccacgtctcggcgctaccactcgctgggcctgtttcccatggtgagctgtgctttcttcccagccagaggacaggaggggttctggtgacaggagcacagtgtctgacattctggccactggagttgggtgttcacagttcgcttctcgttgtacagttcagatctgagtctgaatcaaggacacttgaatctgactggtggtttcttaactacataagacaaattggttattttctgttcctctaaatctgtggtcttttctactcctgccattaaaagataaatttagtaggaacttgctttagtgggaacctgaggtatttggaagatctgactcatacaggttgagcatctctaatccagaatgcttcacaatccaaaacttcctgagcactgacatgatgcattgtagacatttaatagacattacgtttagacggatagttggacagatagacagatggcctaaagagcaaactcaagaactcctgtgtattccagctctatttccatggtttgatgaaatgctaaatgctctctgaggagagaagagcttttgagagaaactcccccaagtgagataggagcggatggctgcgtaaatgctcgtgagattctgtcccttctgaaattggccttttccttggagctctttcccttcagcccccattgctgacccccagcagatactatccccatcccccactccttgttgtctggcccaccttccctaaatcgtgatttcttttcttctttgctcccatgcatcaaagtcaggaagtcaggctagaatagccaccaccccctctccgcctcaagaagcttcactgaaatctgagggaaacaaaaagaaagacatataacatagtcagctttctagggcacagatgggtgatccagtgattccaggaatctcagtaaaagcagcaaagaatattcagtcccccaagttccctgatctagcgctaaccacacttggctcacacgctggcctgtgtagctttgcaggctccttacctgggttccctccttcctggcttgtcatcttggtgcagtgagctcctggcgctgtcttgtttcctgggcacccaggatccactccactgccttccccactctcaagggcagacctctctttgaaaactgaactattgtgtgagaaaagtcgaattgaaatttgcatttcagtttctttttgagggattctcagctttcatatttgctgaggtaaagtttttgtttgcctttttctgtagctcttggcacagcccagtttttgaagatggctatttttaaagtgtattatgcattaaaggtatttaaagcagtctaaagattgcatcatgcagaacgcccagatctgcctcttttgctcctagccattctaatcgctgaataaaacagtgagtagcagtttttgcacaactatgttcccaattctcttgcccaatggcaggagttcatctgggatccacagatgaaatttggggggggcctgtgaaattagttcctaattgtactcaatatttccttcctgtatgaaggtcaccaggtcacagtgatattagcactgcttgtgactttgtcatcattagaaatcacaggtatttttatggcacatttctttttctcttcttcttttttttttttttttgagacggagtcttgctctgtcatccaggctggagtgcagtggtgcgatcttggctcactgcaacctccctctcctgagttcaagcgattctcctgcctcaacctcccaagtagctgggactacaggcatgtgccaccacgcccggctaattttttttttttttgtatttttagtagagatggggtttcaccatgttggccaagctggtctcgaattccttacctcaggtgatccacccgtctcggcctcccaaagtgctaggattacaggcatgagccgccgcgcctggccctatggcacatttcagttgttacagctgcctcacaacaccacagatgctgatctccacttcaaaatgacagcagtaaccagtcctgaactaatttctctctcctttctcctctctctctctctctctctttctctttctctctctctctctctcacacacacacacacacacacacacacacacacacgttgttatattgatacatatctgccttcttttataatcataattttatttgcctaaaaatattattccaagaaggagtccacagacttgcctggattgccagaggggagagggtcatggccaaaaacaagtcacagagcctgcatgtgactttttctcagtatggctttgaaattacagtcatccctcagtatctgagggggattggttccaggaccccctgcagataccaaatccttcaatgcctaagtctctgatataaaagggcatagtgtttgcttataacctatgcatgcccttccacatacaaaaagatcatctctagattgctggtaatacctcatacaatgtaaatgccatgtaaggagttgttatactgtaccgatttttaaatttgtattattttttgttttttttccccccaaattttctatctaagattagttgaatctgaagaagtggaacccacagatacggagggctgactgtagtaatttgacacttcatttttcttaaggtgtatgaaggtcctttcttctctgtttgtaaattatgtggtgaataacagtattaaaaaataagctggcttaaaagatgtcagactcacctagggaagtccttactggacataacgtttaatggcaatctgtgggtaataattacaaaataaaatgcatatttgtgaacaaggactgaaaaaagcctgctagccctttattcatctcacttcctgctgactcctgtggagtctccccgcttggttccagcctccagaccggagcatccgcatggaccatgaagctgctgaggtggatgccctggagtccccaggcggtatctgctgggaagccactggccacatgtggctgtgcaaatttaaatcaattaaattaaaatataattacgaattcaggtcctcagtcacaagccacatttcttgtgctcactagccacccctggctggtggtttccacatgtacatatgtcccagcacagaggatgcgtccatcatcacaggttgttctgttgtttaacatgaatttagcctttcccttcaggttatcctccatggatatcctcctctggtgctgaactggtgcttttctgcacacacttggtcctgtgggtatctaccatgtgtaaaggattgtgtgttaggctccacctcctacagtgctgagtgatgggtggtacaggagaggggacatccatctggcagcctttaatgttgagtctcagcttgaggcctggcccattggtgaagtgagaagccatcagtgactagccttcccctgacccacaaagctggagagagaaacatgtgagctgttgagaagagtggcaaagacttactgtgtttggtgtctgcttcagaaaaaaatgtgagattcctagtggaaacaggaatcctacatttcctgggcaggttgtttaaaggtgggtgggccatggatagttggcggtgagaggaacttcccttgcaggaggccagggaggatgagagcagggacctagagatggcagtgcgtgtgactcacgtcacgtctgtagagaccctctcactagcacagaaccagagtgccctttggaggtgggaaaggcttccccaggagccgaagttggaggcccttggtctattcttggtgtcagaatcttagacacagagggggtgtgacagaccctgtagactagggggacaatagctttgtgtggcttgtatgggctctgttgccatatctcactgtaagctcagaggtatttggaaattcacctgtctccatcattctgaacacatcacccctccctcataagttctgcatcccatctcgtagccatggttacagctccatggtttggccaacggagcatagggtttgcttttagacacctaatggcatatgagtcagcagctttacactcagtgcccagtggcactgccacactcagaacctgcctgggaaactgctcagccagggtctctgacaacagagagtgctgttaagtttgtgttgtgggaagaccgtgagcttctgatgccttggtttactctccatggcccacctgggtgcatacctcttttagagacagagcatttgaattggcgctcacttgacatttgtctttctggcttttcccaggattccttggcagcagagattgagggaacgatgcgcaaggagctgcagttggaagaggccgagtctccagacatcacgtacggccacagtttttacagttttgagattcccagagaccaacttggaccagtgcagtgttcaaaacctagcaatgttgaggctctgggtaccgacagtgattgactattgtccttcccagtccagattaagggaaataatagaacacagctgacagcatccctcagctcctcttattatcttttgttagtgttaatttttatttatttattttttagagatggggtgtctcactttattgggcacgccagagtgcagtggtgtgatcatagctcactgcagcctcgaactcctaggctcaagtaatactgctgcctcagcctcttgagtagctaggactacaggcgcatgccaccatttccagctaatttaaaaaaatcttttgtagacatagggcttcaccatgttgctcaggctgatctcaaactcctggcttcaagtgatcgtcctgccttggccttcccaaagtgttgggattacaggcgtgagccaccactggcctgtgagccactgtgcttctcttcttcttaggttttaaagacaaattgtgaacttccagaaagtcctagaaaaggagagatgtctttcccatctctcttaacacaagctttgtcttgatatagctacacgtttttatctttcctttcagtggaaaacatttaaaaaatttaaaatcaacgtagtgtgagattcagaggggtcttcaaagattttgtgcaaggcttccatctccatctgaatacacctagggatatgagcttctaccatctgtcttcctacctcaactcttgtacttaacctgccccaaggtgtttgtaaggaacatgtggaccaggtttcattgtgttttctgtgtactcagactccatagacagaacttaaatgagatcctgggagtggcaagtgtccaagtgaggtttggtatatgtgtgacaccctctgcagcccagaaggaagtggccattgtaaaaacatgcctacccttttctctttaaaagggaacaaatgagcatcaaagtggttctgctcctaaaataacactttccaaaattagacaaatctagtatttatcatcttattatagaagtgaaagactaacttgaagtcttcctttttttatatgaatgttcaacaaatatccattctacaagtattgattgatttctgctgcgctgagcagtaaacactgccctgctgcagcgtttattctagtgaatattatgaaaaaagaaatctaggagacaaaagtcatacttaagtatttttatttgtgggttaagctttagggatgtgaaacacaatttcactcttgctggcatcacctttaggatacaaccatgcgttcgagtcctgggtttagtgggtgttgaatctctcaaatttcgcattgtgaaggaggcagccaataccctaagaaacaggtggcaggcacaggatagcaggctgctgggggactcgtcataggccaggtgcccttttggctcagttgatcatttttggagggttaaactccagggttgtgcccgcatttgctcactcacggatgccgtgcattctccctagtcaccagaagcgtgtctttgagacagtaagaaacatcaaccaggttgtcaagcagagatctctgaccccttctcccatgaacatccccggctccaaccagtcctcggccatgaactccctcctgtccagctgcgtcagcaccccccggtccagcttctacggcagcgacataggcaacgtcgtcctcgacaacaagaccaacagcatcattctggaaacagaggcagccgacctggggtgagcaagctgggagttttcacttctctgttttggggtgaggagtggtagtatggattgtctgcaggctcagtaattattaagagggaggtagatgagagtcacctgaaaaatacagacctggccgggcgtggtggctcgcgcctataatcctagcactttcggagaccgaggcgggaggattgcctgagctcaggagtttgagaccagcctgggcaacattgcaaaaccccatgtctactaaacatacaaaaaattagctgggcatggtggcatgcacctgtaatctcagctactcaggaggctgaggcaggagaatcgcttgaacccgggaggtggaggttgcagcaagctgataattgcaccactgcactcctgtctgggtgacagagtgagactctgtctcaaaaaaaaaaagcggaccttacagttctccaaatctgttctgcttacccacttgagcctatgcctatccttgatatgatattttaatcagcttaaagatgtataacaagatgataccagaaagtctgctttcctgtgaaatgcttgggggaaggattaatgaatatttttttttttgttaatcttcacggtaaggctacagaatagacatttgttttgtgaccgttttgtagcttgatgttggaaaggctgaggaggactcaggctgtctgtcttgtgaccagaatgtggtcacaaggttcagagggtggggtgcaggggggccaaggtgcccaggactgggctttcctcaggaatggtcagttcctctttgtcctgaagccctgcagaacctggacggacggacggacggacggacagacggacacacacacacacacacacacacacacacacacacacacacaccattgtctactttgtgcatccttttcctctgacttaataagattgattcttccggaccagttggaacagacagacaggaagctccttgatcagagcaggttttgttcagagttggggtctgggctcttttccttcaagagaagagagaaacatgccttaaccccattatccttctggtagccaggaacagcaacctacaggtttcttcctaaaggttcttcagggagatgtttacagggactgaatttacttagtctgtgtgcagatattcatcccaccttagtcctcaccccacctcaaccccactaaaaaagacccctggcgggagtggttctggacacgaatttatttccccctgttgcctaaatgtcaactgcttgccttggttcccatggagaatcctgtagccccagggaacgtccaccgctgtgcattgagcagtcgggcctctgtggccttggagccctgctggcattccaccctcacacccctttcttcttccagaaacgatgagcggagtaagaagccggggacgccgggcaccccaggctcccacgacctggagacggcgctgaggcggctgtccctgcgccgggagaactacctctcggagaggaggttctttgaggaggagcaagagaggaagctccaggagctggcggagaagggcgagctgcgcagcggctccctcacacccactgagagcatcatgtccctgggcacgcactcccgcttctccgagttcaccggcttctctggcatgtccttcagcagccgctcctacctgcctgagaagctccagatcgtgaagccgctggaaggtgatcacgcggggcctcggcccctctctgtcctcctgggggactccctttggtccctgatccacctgcggaaggcagggcacctctgtcacgcctactcctttttcttccgcgacagccacccgcgctgctggtttgagttcctctgagggtggtgctcagcctaggcctccgtccctcccctctggctggcaggtgtgacaatgcacacataggccatgaaactcgccgaggaaagacaagcatgtgcactgtggtcttctagttctttcctttgcctttagaaccttagaaataaaaacttttgtggcggtagaggcactgctaactgattcaaaaattaattaggttttgcctgtgggtgtgaggaatgcagagaattaatgctttagcttttctgcagttttggtgtcggggagaggttccaagcaaactctattaaatggggattttttttttccccataaccacctgaatgtgatttgtgggcttatgtgttctgatttgaacttcatatagcaaggttgtggcttttggcagatgcagtatgttctgagcgcggctcctagagtctacaatttggagtccaggaaggggtggctgtggagacaagtgagttttgtacctccgtaagccaccctttttcagggtcagttcatgtgttagtatcaggggcatctcagatgattaaactcatgggaaaaacttcctctttccctctctccctcttgccctcctgcctctttttttttttttttttttaatttaggcacttataaaatgttttccctctacctgctgctactctgccaagagccaccaagtgcttatatttttcattttttactcctttagtttggaaagccatatacgtttgagaaggtgttttaaaactctgtgttacacttacgatgcaaagccaaatcagaacttctgtaaggcagaactttcccaactttaaaaaaattattgtcccctctaaggagccttcttagacgttttttcctaatcacccccaaagacattttaataccacatatatattgtttatgtactatatgtatatacataaacaatacataagcaatacatctgtggtattaaaattaaaaagaatccaattatgtttacctcaaaagaacctgtttttgcttcttgggagcaatattgcccctgtgagactgcatgctataaggtaaggttgtgcttgttaaagacccaagacatgactgggttccacagtctccaaaggaagagggtgggctagtctgtttttattattattttaaaattgtataattggggtctttcttagagttcagaaaaggtatagcttactcttttttaattgtttatttagttgtaagcttggtgattgttttctgatccacattgtgtgtgttcttcaataaaatctttcatttctgcaattttactttctgccttacttttcttttttctcctttgtcactcaaagatcattggaatttatcatctctgtcttgtctgctttctatatttgactctgtgtttcattagatcatctaagaatatgtttttgaatttattttcaaagcacatgttttagccagttcatctttatgtcttttaattttgtgacttggcagtatttttgtgattagttaataggataataggaaatcctgttagattagcaaggtgaatttcatctatagtgctctgctacccaggaggctaaaacaatacaattaaaaagttatttgtcttatcacagtggcctataacacaacctcatgatacagattcttttgattccattttgtagttctctgacttcttagctgtttatttatgtatttagtttttgaaacagggtctcgctgtgtcacccaggctgcagtacagtagtgtgatcatagctcactacatgcctgaattcctgggctcaagcaatcctcccgcctcagcttcccaagtagctaggactacaggactgcaccaccacacctggctaatttatttatttgtagagacagggtcttactatgttgcctaggccggtcttgaaccattgccctcaagttacccttccacctcagcctcccaaagtgttaggattacaggcatgagtcaccacacctggctcagacttcttagctgttacaaccagtattttcttttttccctcccctccacagttattttttgtgttaccatgtttaatatgataagatgggatgctgacacagaagtcagcctgggctaggttcagtacagctctgactgtgacattagataaatcaccccactttttgagccctgtttcctatttagttgtggttgtgaaataggctgatagccatcagaccagactgtggtgaggagtaaatgtgaagtattttatattgtacctggcatctaataggtgcttattaaaatgttggcttcccaagcttgctccaatccaggtctgtagggctgagttactagtattgagatctggaccagcactagggtcatgttcttaaattatctttttctattggcccactgagaagctagtaagattcccataatcaccagcagcccaggtaaatgtacctggggtgaggtccctagagactgttggctgagatcatagcagatagccaatcagtgttttccatctggctccgttacctgttgaattaatcttgccatctgcttattgtgaaagccaaaaagctaagtgtttaagagtgctagcactttcttgtctcttcatcttaccttaccagttttaagcaggtgaagaacaaacaaaccattcaaactagaaagatatctgtgttaaaaagaccaaggcgggcagtatttttttcctgtaatttgcacttcctttctgcttaatcataaccaaggtagcatttccaaataaataatatgtaaataagggaaaggatacacttcaaagctgtacattatccagcaggtttcattctagtatctaagccctgatgctcctctgacatcagtggattttggggtttcctctcctttgatgacttgaaaatgttttagctggaacactggggtatggaaggaaagcagagggggaaggacgcaatgaccatagtcatgttttccccactgtccgtgcccttttcccatagaactttatcttggggccaaccaggaacatgaagtttcctctctttccttgccctgtttgcctaattcctgcctggttttaatgtgggtgggaggagtgagcaggtcttgagttggtaatgggaggtagctcatattacagtgtttggcaagtaaaggaagccaggctggggaatgagctggagaaatggaaagaaagaggtaacttgggctctgaataagatgcaattcatatttattttttaattcttataccttcttatgtcaaaggaaggactccaggcagccaggggattggtagaattcccacatgatggtttaggcagcagcagggaggtgaagcatgaggtgttctgcccagttgatgggtttggcaaaccccgctgggactttggaaccagccagaagtggagatagtccatgagccccatagcatgacataactgaaatagcacagtcaggtttgagaaagcacccacatgagaatctagaaagccattcagttgtgttattgactaggtttcggaggctctcatgtgtaaggcctgtcactgctgagagttaagagaatggacactggagccagccttggtttcagtcccagatcagtcaagccacttgccagctctgtagcctctagcaagttactttcccttcccgtactcaagtttcctcatctgcagaatgcagacagcagggataacgtgaagattaagtgaattataaatgtagacctcagaaaagtgtctggcgcttagtaaaagcccagtaaaagttggctgttcttacatgggtgttcttacatcccaaggcatgggataaaaatctgagcatgatgcgtcttttcacataatgttttagttgtaatttcactaaatttccttggctgtggagtgtcagagaatgcaagtaattccatgcatttctgtggcatccttaactccaaacagcagaccctttgtagcctcatttctttctcttcagcccatccttgggagcgggtgaggagagggagtgatggggcagcctgttgaacagttggaggagaaaggcctatgagactcttgtcagggcccagacctccagcctccctgggttctttcccagtgaattgtaaacatctcagacccccttcagaaggatgaggaggttggcatttccttaccagggttcttcacttcccagagtctattggcataccccccttttcccttccaaaagtagaggtgacgtggccatattgtacatggggttttctcatcatccttctcagactccagtgtacagtcccaaactgaacatggcagtacagtggctactttaagacttctcgtggtgctattttgttatcaggaatgtgcctgcacagccagtgagcatttgtactggggcccattaggtagtgtgaatgggagtccgcagggacagcagagaactcctatcagcaggaatatctcctggcaggccctggacacccatctggaaattctgctgctgaccatttgtgcagctgggacactgatgtccttcttgttctcagacctgtgggttttgatgggtgggcagtgaacccatcaaatgggttagttctgaaccccggctatgccaccactaattaagtggctttggaaagttatctaacttcaggcagccaccattcccctatctgtaaagtatataatcatactcagttcctaggatggtttcaaggagtgagctggtataatacatgtaaaacaaactgcgatgcaggcctgcctcaatatagggaagcttaatttaaaaaatcacagtgatgctgtggcatctgggactcgggagcccacgaactggtctctgcaggtctgcgaagccccggcgttgtttgcacagtgttgctagcatgcacacttcctttaggaagtgggtccacagcttccttcagattctcgaaacatctgagagttaagaaccacagctctagagaaaggcttctcaatcccagccctgctgacatttgggaccagtttgttctttgttgtgggggctgtcctgtacattgtgggatgtttggcagcatctctggcttttaccccctagatgccattagcaccagatgccgttcgtccacagctgtgacaaccaaacgtgtctccagacattaccaaatgtccctgggggagtggggtacggggcgcaaaattgtccctagttgagaacaccgctctagatgcatcttagcacctagtgagagaacggatatgtgataccctctttcattatagtcattcttatttctttttttcttgaatttagaatattttctatttatatttaatagatccaaattaagtatgttgctattgtacccgtgaacccttaaaactgggataagccttgatgtgggtgtctgggaactctttaaacatgtattggcagtgtgcaccttttttttccttttgagtggatttgaaattgttcatttataaatccctttcaagcctccctggctgagatcgacacatgagaagttatttccaaggggtgtttggaaatggcagactctgcgcacaccatggggcctctccctcaccccaccgcctcccacctcggcctgcctgtgttcccttctcttttgtcttgacttcctgagctgccgactcctggcatctttgactcccttttcttcgctccccagggcaacctggtatcctggagggcttcttgcctacccagaaagtatacccttggtaaaccagtggtgactgcccgagcatccatttgtgcaggaagcctcctgcctttcggtgcccgagaacctcttcagaagtctctcctttgagcatggaatatttatttgtgtggccatgcatatttgggtgccttcttaatctgtagaatggggctagccctgccagcctcacgggccatgcactagcatggtgtcatgtgaggtgttaataagtgttccaagggtaaaatgggttgctctgtcaagtaagttggcaagaacaccgtagcatactaaaggttctgtgatgcccctcagtaaaaacacttaactcaagtttcctgagcatgcttggcctaggaacacttctctttgtagaacacttgtgacaccttgaggtcttcagggacacactccagtgttattacagaccttgcatgatgtcatgtgagtcctggggtttggtgtcatcgagaagatggactcccctgctttagacctctgtgtggacttactatgttcttaaatcacacctctttaacccaattccttctccctaacccggcagcctctcaaagttgctggcaaaatacagaaaacctaagtaaaggaggtgatggccacatctgccacacatctctgtgtactgctttcatttctttttgcttttctcttgctgttggtcgtgggcttggtttgacatgatcttattctgcctgagcttatgtcttccgtgttcccaggagtgtgtatttggcatagaatacgtacatgtggccccgcttttgtgcttatcttgccattttcccccttccattttgtaaaatgagaagatgttgagttctggggttgacatcagttgattaaaataaagaccttgccccaaacctcttttgcacatactatggtgtggattttactttaaaaaaaaaatggttgatttcttaacttgctattccttctgagcatggtagggtttggcttctgtttcatggcaggaagggctaaggcggctccactgaagttcccgctgcagtccacctggaggcccagaccctgctggggttcacgctaagcactttgagggtggtaaacagccattgtcttggacttccatcctaaccctctcttctccttgtcccccttcttcccttccctttctcctgcaaggttctgccacacttcaccactggcagcagttggcccaacctcaccttgggggcatcctggacccccggcccggtgtggtcaccaagggcttccggacgctggatgttgacctggacgaagtgtactgccttaacgactttgaagaagatgacacaggtgaccacatttctctcccacgcctagctacctccactccagttcagcacccagagacctcaggtgagaggtcccaagcacgtgtgactgtctcaggcagcagaagttacccgagccggcctcaggcttccccagaggagatgcaggagccgccagcggccacggaggaggaggaggaggaggaggaggaggaggaggaggggtctggtgagggcaccacgataagtcctgtaaacttggcacctttcccggaggcagagttttgggccattctcacctctgttccaggcaccatccgtagtggttctctgtctgtagcttccgctcgtctgtgtgggtgatgattaaagcattctcattgcacagttctgtttttaaatacagagtctgatgcctcctatttgtaacaatgggtgtagctcccctgcccatcttggaggtgcatggcccatcagggatctttaaagtgggagcaggaaaggctgctaaaaaaaaaaaaaaaaaaaaaagtgggcttttgggtccctgaaaacatcagtgcccttcttcctggtctgggtgtctccctgagtctaaggggaagattctcaagtcccctggtgatttccaagtggagctgagcagttttagggaaattgagtgctgggtcattcagaaggtaaatgagatcatctgttacctgtacgctgtattaaaatagaaccaggaaaggctcaggatttcagacatttcgtcagccttttcactttcccagcttcaatggaggtatatatgtcattttcttttcagcttacacatgtgttcaaagtggatttttaaaaagtgttttagcaatactccttaaccaaataaaccttcggagaacgtcactaagcttttccagagagaagaccctagatgaagttggaaaagagctctggctgactccacccactgtccccaagcattaaaggtgtggccatgagtttacagaattacccacattccagttgccactgggatgaaaagctttgtgctcagagctctgggaatcatgggatcacatggttactgtttaccccaacagcatgctctgtctagactggacctcccagccccttgtgttgggaaggcaaagcttttgtggagtcaggggggagactgagaaaaaatgaattaaccctgtgttgtcatcctcatgacattcctgaggattcaccaggttagaagtgaggacgtttatctttgtgattcataattttcatttgtgaaggccacaacactccccttgaaatacagggcaggaaagagctgaggttcttggtggtgtctcccattcccctggctaatttcagacagctgtggtcaagggattttacttgggatcaacttttccttttttccttgacattaattttagagaagtcatcaagtcatgtgatttgtttagcacataggtttatttatggtttgattttttttaggcagttatattactagattaagcttgtgagggaatgaaaatgttttttatttgttatctacacactcgaaaaagagaaaccagctgcggtactgtcccatttttgtcatcagcaccagtgtccgtcaggaaggcaggtggtggtgcagaaacatgatgcctggctgattttcgtggctaaaggggtaggccttatgttgattgggatgctcccctacagccttacaggtagaatagaaggtgagttctggaagtgcaaagaagcaccattaagtgcatcttctagaagttgtacagaaggactaaagcttatcaagtcaacaaagaacttaccttggaggatagagagagagaagggaccaattatgaggactgacatcctggccactctccttaaaataaacactgacatttttcttgcttgttctctctgtactcaaacctgtggcaaattcatcctagcaacgttatttgacgaggggcatgaacatttatagttgaaactgtagaaagggtcaggttggaggtgtgtaataaaaaagaattacctaggttgccaaaggtaatttaggaagggtctgatcatttagatgagagttctttggggcttattttctgggtaaggctcatctttaaaaactggcttcagaggggagaggggagaacaatgaattggctctattttctctattgggaattacaggaccattttgattcttagaatgtaaaaagcatatcgctaagtaaatcatcctggaggtcccaagtagctctatgcctgcaatcatggagacacaggcagacagataagcttcatggggaaggcatggggcatcctctgtcttgggatttgtatccatggtggtctggtccctgccttttaatccgtcctctacgcttgggcttttctgttaccaaacagcactatcccaggaactattgtctgcctgggaacactcagtagggagacactttggagacaggaggtgatgaacctttttatgtgcagctggtatgatagaaggaaattgggaaaacttgtatgctaggcacttttgtccagagcctgctgtcccatggagaaaaagttttaagcactgaaaaaatttgattaatgtatttaaatgtattatttgaagcatcattcacttgttgatttttacaatcccatgtcttaaaaaggatgaatccatgttattgtattgtaaataatttagatgattaaaatggattgtttaaaaagttttagattatagttttactttatttcagtgatatgttttatgttttaatttatatagaaagtatactttatcagaactagttatcatctttttctgtcagtactctgtattttaggcatttgtgtggggaagagcctgcatgtggcaaaggattaagagttaaagtcacacagttaaattggtagttggctagtggatgggcagttcagttgaattatcttgaatgctttgatccttaaaggtgagaaagaagtaggattcaagccacatggatagagaaaattgacagtcagtttattttaatgcttttactcatcaagactggttcatattgaggggagatatcctcaaaaacttacacgaatcattgcatcttgacatcttacctggcagtggccctgcagtagaaccatgtcctaattggagctgagattttttttttttttttttttttttgagacggagtcttgctctgttgcctaggctggagggcagtggtgcaatctcggctcactgcaacttccacctcccggttcaagtgcttttcctgcctcagcctcccaagtagctgggactataggcacacgtcaccattccagctaattttttgtatttttgtagagacaggctttcaccctgttaaccaggctggtctcgaattcctggcttcaagtgatctgaccgcctcgacctcccaaagtgctgggattcctggtgtgagccaccacatctggcctagagctgagatcttaaagtcagaatggaagacaaaaaacacacttggctaaaattgcccttaaaaaattccctaaatctccagcaactgggccaccaaggcgaaagccaggaatcagcttctttcgttgcctccttgtttgatacataggcccaaggtcaggagcagtgactgagtgaggaaagggcagagaagggcttgtggtgagaaggagccaggcggagtcaggccagctgggtgttcctgcagctttgcccgggcggggcagctagagcaaagctcagccagcttgtatcctgtcccctcttcagtacaccacagaccacagaactggggttcagacaggcttgtgagaagttggtttgggggcttgatgggtctggaaggaaaagtctggtatgctcgattcacagacccttgggtgcaggcaagttccttcccattgtctacactgagagagttgatgtgagttcccatgctgttgggaacacttcgattcagcctggttttatggcagttatgagggagttttgttgttatggacagagtggatagttggctcacacccacctgtattaggagatgctaaggaaagccctgtgctctgccgtcagaatatatattaagccagagtaaaacaggccaactgccacctgcaagtggaaaaatgaatgaagaatgaaagaattgactccttcaaaacaaacagcatagagtcaaccctgcttaaaatatccagaacaaagcccacttgttgagcattttctctctggtatcctcacctctgaacactacagagggccccctggtgctcctagaggcacgtgggttgctgaggaggtgtctgaacctgacacccttctaatgtggagggcccttgagggagcaccctgtgttgagaggaggagctgtgcaaccacactgcctagtgaagcacaggtgaagtgctctcttgtgctggccttgaacgcactagtggggaaaggtcttgatgcagctcagccaggccagctcccttcacctgttggtgtctgccacagaaggaaggacaagaggacagagggtatagggaccagctttgttggtgtctgaagactacaaagggatttctgcatttgccctttggacgttttaatagcattctaaaaatccccctctctctagaagataccccaggggcacttgagagaatttctgaccctctctgcacaatgctgtgaaattgtttatctcttaaatcacatacttttcagatgaaacagggtaggcaacttggtgtagtgggaagaagagtcgacttttaattttgcagaaaccaaaaataagttgtgcagaaaccagaaaaagatcttgtgatgtgtggttcgaaatctctgtgatagaaacctcccaggttcctgctggccagatgtctgatcaccgaggagctcagggacctctacggagctgcaggggcagtcgagagctctgttgaagaaatgcttaagcagagaaaaaaataaataccaagcctctgtgaagcccagaactaaggcctttaaaagtgttatcttgtacaacatattacagtttaaaatcacttttgtattttttaaaacaagaaagttgcactgttgcatctgaaactgctcttgattccccgactcctcacctccagagaaaacacttgttaaagccacatgaatccctaacatagtacttgtattaatgatgactcgtagggcaaactatttatgcagcttttcccacgtgaactcatcatagaactttttttccccctgaaaatatcatgggcagagttacataatgaagagacaggaaagtctttagagcatcttccatgccctgatattttagtcttttaggaagagataaagcattgcttcttccctatctgtttaatggaaagggaactgtttctcatgcagctgacaggcaaagacacatcttcctctcccctttccacccctcaagcaaaaggcaacaaagtcattagaagctgggcattaaacaactaaaatatactgatattcctaggggatagtccaagacacacccttaagctggatggacaatggcttttattttcaatagatttgtttttacttggattgaacaggctggcctgtgggtgccactgttggggtgtgtgtgtgtgtgtgtgtactggttgaggagtttatagaacttgcaaagcagatccaagtcatgtgacagcagcagcccactacatgcttaagtcaaggaaagaaaggtcagggtcatagggtttattttacacaagtcggccacttcccaagagtggcaaaaagaacatggaaggccctcagtgcatcccaaaggtggagtcccttttccaagattttgagatgcttttgtaaatttacatttatagaagttatttatgtgagtttttaaaatagcttgggtgtgtggcatggccagtgtttctccgttctcagaggcttccttggaagcagctgtatctgggtgtatattgcaccctcaatttccccatagcaacatgccaagtacggttgcattttccaatgtctctgggctcatgtgagggttcttttaaggactaggttctatgatggcctttagagagaagaaagcttctgttgtccccagcacttcccagggatgcgggaaggaaagcgccattagaagggaagaaaatgcatgagcaggtgtgtacaaattgtattatgggcggccagacgggcagagttccaatcatcctgcaaatccctgtggaacctctgggccccaccggagtgtcccagcctcttctgtgtccccttctcctcactgtgaaagcactgggccatgggaagcagtgggcttcctacgtattttccctgggaggcccgagcagcagccaccctgctctatatagtgcagtctgaggggcatccagggagtaggggccgtgtcagggctccctcctcactggctgcagcagaaggatcccaaccacccagtttttcagtcagtcccaggcatcatgggcccccgaggagcatgggcactcagtgccacttaccaagcatacctactccaggcagaaggctcaccagagtccaactagagagagcaggtgaggtctcactctgtaagagtgaaagtaagagtggttctcactcttgcaaagtcctctgatgtgtccacctgtagctagctgaaggatgtgtgcttgcatgtggtgtgttttaagaacaaaacatctgcacgacagctacgggcagttcatcaacacaggagatcttgaataataatcaaggattaattaagtttaaagcgtatcacattttgtaccagtgtcagaatctgggggaggaagaacaattaaaaaagaattaggggtttttattggtaaatccaaattcattcctaaatcaaatgatgaaaatatttgtcgttgttaatactctaacccatttaatatgtgcctgtctcttcaaaacactaggaagccctccactcaggttgagagaaagaataagaatttaaatagggaattaaagccttaaatccaagaaactctatcctttgagctcccaaatgagcagcatgggatgaacacataataccatcttctgcaaagaactttctgtttagataaagaagggggctttggtgcgtggcatgggcttggtgacttcacagtgagccctcacccaacccccctatttcctgccaagaaggatgttttatgtttctctctctctctcttttttttttttttttttttagaacttgctctcttcctgcacccagggctttaggaatcagcccgttgcttctctgtagcaagcatgaggagcctctgatgatcccagtcttgggtgactcactgtctctctgttgtgtctcaaggaagggaggtgcagcagcatcctggcagtcagtggtgacatgcggagagcccacgggtccaggcgtcctggtggtattttggaagggccaaatctctggctttagcactttggaaacttgttgatcttccttggtcttctacggctattcattgcttctggggaatggtgacttgtgaatttttagcagccttttcctatccccaaaacccatttgtataagatgggtttgcttctgctgatgcaactacgtctctaaaatgtccatcttacactccctattgcaattgaagatccaatatgtaagagggtggaggaggaagtgaacatttgtgaccttttgatttgatattctggccatatgtttaaatgggggtatgcttctgattttaaatccagccttcccttgtttgatttcttttaaatgttatctctctttcaactgtgttgtcttatttctatttactgctttccccctctcctccttcccaaataacccctcatgcctgttatttgggatgctcttcccaggctttttgttatttttgtttctagaccttattgcgggaagagaatcgtgattgtttggttgccttctcttcatagcttactccatttttgttttgcttgtggcagtttcttacttattggagttcctgagccattatgttcactgattgagaaagattcataaaggctatttttatgtgttttttttttccttccctcctgctttgcctggagctccccatggctgagagttttctcctgtggccgtggtgctggctgtcacgtcaggtgccatgggagcctgctttgacacacagacccgagtcagaccttaaaaatcagggcaaaccatcttgccttgttcctctagtcaccatcacttttgtactctggatttgtcctgcctacctttaatctgtgtctccagcatttatttttttgtttgtgtcatcgggttcctggttttcttttaagacatagtcaactgtgtggacctgtaggtttggggcagcaaccaattccattgttttcctttttgtcaaatccaagagaaaatataccataaggagctagaagattctagttcacagccttttgaatcttcatggcctttgaatcctcatggcctctgaaatctgaatcagttttctcccaggaggtctctgggggctgagctgctacaggggcagagggtggggtggggttgggtgggagaatcatcccggcacttcatcgtgcatgctatttcgggcagcatcttttttttttattttattattattttttttcctgatgcttgagttatgaatgaggatgacctctgcaatcatgatgtctcccatagactctgttccttgttcctttgccagctttctcatgcatggtcctaacacttccatgatttaatctgctgcagaccatagtcttcagccacctcagcaataacttgttagaacattaaaaggaagtaaattgagaacaacttgttgccatcccattttcattagaaatcagacatcttagagatgtcaagaaagcagctagcagctagggggtatggggacctgtcctgctcacactgctgtgtgtcagaccagacctgatcctggagctcaggaccctagagagccctgatctctggaactcttgccacgttgttgctgaggcagctgaagtccccatctcccaccataacaatcacaaatagacagtagtggagccagcatccccaggcccctttttgtgtaagcagaaagggagctgtgagccttgccctgtttgcaggtgtcaagtgcctctccctgcctgtacttctccccttcctctgagcagagctttggtagctgttgccaatgcaaagaaatgtaaagcagcaaaagaagacagcaggttctgacctgaggagggaaaccaaatttatcccacaaaggcccattaccccacccccctcgcctcccacccccagactggatccactactggcccaagaatactgatgagaaacctagtctggattgggtcggaagctggaatttggtgctctgcagaccagtgctcaaaattgtggttatttttgaggactcgccttcaatccagaacatttgcgtttcaccttcctcgcccagatccagttaacaaggtagctcatcacttcttgcatctgttgagtgacatgctggattttaatttttattgtggttgtacttggatgcaaggaatatgttttgttcctcccaatttagcgcaccatcctgggaagtgcatgtctcagaccaactccaccttcaccttcaccacctgtcgcatcctgcatccttcagatgagctcactcgggtcacaccaaggtaagggaccctggctttggggtgggcaggggtggggtgaagtcagggcactcccttccctgcaaggcttaatgttgaggaaagccaagtagagaggctcatagaaaaaccaactgaagccagtgtaagcatctcagcatttgcaggcacttgttctgggtcccatccttccttttgttgttgttatgtgttttttttttttttttttttttttttgaggcagagttttgctctgttgcccaggctggagtgtagtggcgtgatctcggctcactgcaacctccacctcctgggttcaagcccatctttccttttgagttgaggctattatttatttggatctggctcaaataaagagacctggaccgacccacctttagttgcccttttagttggctatttagttagaaatggattcctaggccgctccttaaccagctgaagttgacactacccaggccctatggctaaagtctgttggattttttgcccccaagtttgtcagtagagcacagagttcttttatttatggatggagttactgagccctgtggaaccccttgtgcctctggaataggccccaggaaccatgcagcacagccaaacggtaatgaccaaaatgagaagactccaaaattgagccatgtgcccagcatggtccatttctctctggagcaccatctatggggaggacttgtctggtgtgagttggtctgtttggcctgatttcaggcctttcactgctgccagcaaaagagaaaatgctctcccctaacagagtagaacgaccccctcagctgtttcctctgtggtgtaagatgctgggttgctggaaggtaaagcagaaggggtgggaacagtcagccagggagcaccttaaactatgaataattctccgcaggtcatgtgaggaggacgacgaagcagccatatgccccgttgagctgagaggagatatagggcagagagtctgagcccacgggcgaggcagggggtgagcacaccgccagcagtgcctgccctggcagggccctgtggaaggagctgtgtgtgcacgcgtggccgccactaacccggggacttaggcttggatgtgtctctgtggttgtgcctggctaactcggccttgatggtcgatgcccctaacccagctaaacacccccagtcaagccgagtgccagcactaataaaggcctaaccctaagttctcaccagacggggatcataaatattagctttgtctcctccgtctctctgcccctggagaacttggcttcctcatcctgtggctttatgttgggaagagattgttttcaaaaccatggaaccaagcttctccctatgagaggctggtgccctgggtaactagatggcactcctgactgtagccataggactcaaaccaaacacaggttttcatgtggctgtgtcagggccgaacaaagcctgggaagtcagtagcaagagaaggctcttttttttttttttttttttggcttgagtttgaaagaaaggctgcttgaaataaaatggaaacaaatcaattgaaacaaacaaaatggaaacaaaatctccctagggatggccacatcaacatgattttaagtctagagcatttttgccctttactgagggtacatcaacatttgtaaaactccacaaatgccttctgaaaaaatccatgtttaaccttaggaatttgttgtggtttctaatcatgcttttccgagtcccccagcccaccagcatccccacccctgagcttgtgtgagatgggcctgttctgggatccccaccctgtgctgacctcccagggctgaggtcacctgaatgtggggccagttggttcccctagcttgtacgttgctttgaacctcgtgtttcccacgagggagggggccccttctctggtcatcgcaaagacctgctccagaatgggcccttttccttcccattccctcctttggtgcctttctcagagtacatggacttccttctgccagactggggagagaagtctccatccccagctcctagggaccatgcagctgacctgctccaaggcacactggcagccccagcaaaatcctggagccggcaccagggcatgtcccacgagactgttaggagggctgtgcatctttgccccttggttgctcattgagaagcagtatagggcttccatgcctgtttggcctcccctggatccctgtagcagctgttaaaagagaacctttccaagctttgcacagtggcagtatcatagccaatgaggtttattactagttgaaaattttccccaataccccgccgtgacgacttgagatagaggcagcattggcaatttttgacagtttttagggatactgaattattaggttggtgcaaaagtaattgcaattataaaaaaaaaaaagaacctttcctgctttttaagcagacaacaatgcattcccctctgctgcccttctggaaacttttctgtcctaatggactccacgactggatcccaactgctggaacctagcaagtccctagtgagcacaacacgagtgaatgaacaaatctttctgctttccttccgtaactcaggccccacacatttcagtgggcctttccctgggtagcaccgttgatgtagatctcttcatatgtgacatgtctccccgcgaccctctaactccactggttagaatggatttgggcaaggatataaagagggttaagggcagcacggtgcagaggaaagggctctgcacccaggattcaggagctcacggccacaactgactggatgggcacagcctggcctcagtccatgcactgtggccaaccttacccttcctaagataaggagtatctcatctcccagagtcctggttcacgtcttgcttcagggagaagtaggtactaagaaggaatgctggaatctgggtaaatttggtggagaaagaatgcctctttgccaaagggcttcctttcccgttctctaacagatttagagtccctcaacttgggttgtccacttaacagccagatgtgacaccaagtaaacccttagctctgagcctgtttcttcatctgcaaaggggacaactgtacccaccaaccagggatgggcaaaggggatcatgtgcagcttcctgttaacttaaaccatgcttcccttgaagggtgagagggaggagcagacgtggacagagcctttgggggcctcagctggtggaaccctctcatcgtgtcctgggtcgtccctaccccccctgcaggaaactggccactgaccctttctctggagctcatgggcatttctggtgaataacctgtcatttcttctttcagccttaactcagccccaactccagcttgtggcagcaccagccacttgaaatccacgccggtggccacaccatgcactccacggagactgagcctggctgagtccttcactaacacccgtgagtccacgaccaccatgagcacatccctggggctcgtgtggctgttgaaggagcggggcatttctgctgccgtgtacgacccccagagctgggacagggccggccggggctccctcctgcactcctacacgcccaagatggctgtgatcccctctactccgccgaactcgcctatgcagacacccacatcctccccaccctcctttgagttcaagtgcacgagccctccctacgacaatttcctggcttccaagccagccagctccatcctgagggaagtgagagaaaagaacgtccgcagcagcgagagccagaccgacgtgtccgtctccaacctcaacctcgtggacaaagtcaggaggtttggggtggccaaagtggtgaactcagggcgagcccatgtccccaccttgactgaggagcagggacccctcctctgtgggcccccggggccagcaccagcccttgttcccagaggcctggtacctgagggcctgcccctcagatgccccactgtcaccagtgccatcggtgggctgcagctcaatagtggcatccggcggaatcgcagcttccccaccatggtgggatctagcatgcagatgaaagctcctgtgactctcacctcgggcatcttgatgggtgctaagctctccaaacaaactagcttacggtgaggactggaggggggccggttgccctagaggagacccacgttctcctctcttgctcccacctccctctcttccccccacagtgcactccctccctctgcccttctctgtccaccccctcctaagctagacaaatcaacctcgtgcctaatggaggaagtgtggaaactttgtaaaatgtgtacataggacttggagaccttgtgtccgccctgctctttcttccgatcccacaggaagtgcccctgcactgtcatcactctcacgaggacgtcacctgtgctaacctgggggaaggtggggtcctttcttctttccttttgagaagcactgaaactcccaagtgtgttcttatcccatggataggaaaccagtgaattccgtggctggcacaccacgagctgtcacgcggcacgggtcataacacatctgggtgtcatcggacacctcacctcgcccaccctgtaggagcgtaaggagcctccatcctcagccacgtgcagctgacgtggctttcctgatcggagggcttttcttttatgggtggcccagcttcttcaagaccttcactgctctgcctcagtggacagtcgtttcttttttgaggtgtgaccttttgttttcatgccttccccttgaagtcatcctgtgttttgtaatcagctgtcaggccaaatgtctgacccgaaagagaatgtatttacactcatgctgcgttgttcagcagcccctctgtgttctgtgtgatttgttttatttttccttttttttacatatatatgcagggaagtaatggtactggtagtgtatgttttctatgtggttcaaatatgaatttcgaacacaccaagccgctaatgagatagcagcttttttctgggacccagagtcacaaccaaattgatttaagaccggacccaagacacctttaacaataggactgaaaggaaaaaggatagggaaaaagcttattaaagaaatgtgtcaacaccaaatgtagaggggaagaaccacaaccaggcataataccaaaccggttccagggggaaacaaggctttggtattccgctggctccagcgctttttctgaaacccgaggctggccagggtgctgtcaccatgcggtctttgattgcagccattcaatgcccacatgcttttccttcttgtttcagaacagcacatggtcacaacaagatattttctttccctccaaagccttttgtctccttgtgcctctttttatccttaggaaaagatccaggtgcttgtgaaaagaatcatgaatgcaacaagggaggctggtcctgttgctgtcgccgattaagttttaaacttttatttattatttatgtctgccgtattttaaataaacattctcgttccttccagttccagtcatagtgtgtctgtggcattccagtccaaccatgtgacttatttattctaatttgagggctgcactgtacaccatggtgtcctgtgacaccgtgttccagacatttatggaaggaaaacatcccatataaatgaaactgtcatgctgtgtcctccccggcagcagaagatgtgtccttccattgagtgagggtaaccttatgtccaccaaggatactttgagaaagcccctaaggaacaagcctcagtcccacggtttcagactatttattctctgaacacaagagtattggttaattatgttctcagctctccctgctgttgtatgtgtgcattcactgcaagtaacttatatctttttatttgaatgtattttaaagcagtagatagaataacaaaggaatatgaaaaccatggactgaatggaccattttatgtattcagagagagaagccactcatcattgccagaaataccatgtaaaaattggcagttcagaggttgcaatacttagtatagtaaataaataaacggtcaacattgtgcaaccactaccaaaaagtgtgttgtaatgcatcaaaaatcaacacaattttattcactaatgagtatcaataaaataagttcaaatgatggaaaccacactggtattctgatttgtattttgtttttatcttttcatcaaggagacgatctctttatgtaagacttgaaagtgtttagctctttgcaaaattaaatgaaaggcatatacttcacatactgttacatgccttctttctttcaacatgatatcataccttagacaactttccagtcagactctgaagatgtccctcacttttcagggctgtgtactattccactgtgtgcatacacctgctgtgaattatacatacctttatgaaccatcccttacagatggtcactgggataattctttttttttttttttttttttttttgtggagacaggatctcactccattgcccaggctgcagtacagtggcacgaacatggcttactgcagccttgacctcctgggctcaagtaatcctcctgcctcagcctcccaagtagctgggatcacaggtgtgtgccaccatgcacagctaatttttattttgtattctttgtagaggtgggggtctcaccgtgttgctcatgctcttcttgaagtcctgggctcaagcaatcctcctgcctcagcctcccaaagcaccgagattacaggtgtgagccactgtgcctggtgtcactgggttaattctaatcttttgctatcacggtactgtaatgaaaaaaccttacatatatgcaattgtccacatatgtgagtacatctgtgaaataaattcctggatggttattgccaaattgccttccatagagttaagagacaaccaaggacagtggaggtccaccagatggagaattgtgagaagaacaaaagaaaaaaataaatattctgccacctcaatatttgaaagcagtgagattatgcaaataaacactgtggtaggatgtggcatcatggattttaagtcaggtgctaaccatttggcagtggtgtgaccttgggcaagccacttaccctctttaggtcctccattttttttttttttaaacctgtgacatgaaaacagtaatgcaccttagagttaattagttgagtcaatgtattttgagcacctaccatgtgccaggcatttaagtactggggacgaataagtgagccagtttctgctgtcacggagtgtacaatctagagagaacaacaccaagtgtagaataacaagggctgtgcagagaattaaaacagggtggtgtgaaggagtgggtggctgctttggattggacagtaagagaaagccactccagggaggggtacttgagtgaagcatgtgagatctggcacaagagcatttccgcagagagagcagctggtgtaaaggcccggaggcagaaaagcactttggtgcgttcgaagaactaagagaaggcctgtgtggtagtgggctggtaggatcgagggagcgtggtggtagcagaaattatggtgctcaccaaatgattcatcagatccccatttcccagccattgcagtcgagcaggtcacatgattagtggctggccaatgggcaataagcagagaaaaacccgtgcatgactctgtgctcctctcttcctgtgtgttaaaccctcaggtcacgtattgaagtgctggagtctccaccatcctgagtctccaagtatgtggaccagagcttcctgccaacctatttgacatgtaacctgatggagaaataaactttgttgttaagccagtaagattttttgatagtgccttagaatcccaggtatagggcccaggtatctgtgttttaacaagccctcaaggtgattctggtgtgcaccatagtttgagacccactgcactagaccaggtggagtttgggtgggagttctgctgtgggacgcaaattcccctttccagtctctccttgtctcaggggctctaagaaggtcagatagccgcagcccatcttaattgaaaggaagagagagagagtgggtgggcagggaaagctttgaggtaaggtgaccctgtatctgggtttccaggatttgccaagtggggaaggcattccaagcagaggaaggatggaaaggggatcctagaatgcattcctctatgcccttccttacagtagaaggaaggtgaatgacaaatacagaagggacaatagaattagaaaaactaccatttcactgggtgtagtggctcatgccagtaatcccagcactttgggaggccgagacgggcggatcacctgaggttgggagttcaagaccagcctgaccaacatggagaaaccccgtctctactaaaaatacaaaattagccgggcacggtggcgcatgcctgtaatcccagctacacgggaagctaaggcaggagaatcgcttgaacccgggaggccgaggttgcggtgggccgagatcgtgccattgcactccagaacaagagcgaaactccgtttcaaaaaaaaagaacaaccaccgttttgaaaccataatactaactaattcagacaacaatggatattgaaaccattgggtaaaaattcgttaggcagcagaatatttacacccattgtatcttcccacagaatgcttattacttacaaaggggggacaatatctttgcagtggataactctgtggtacgccactttaaacaagtcgtaaaatttaacattacccaaaatgggacaaactgctataagacatcacctgttatgagatgtactgggagagacacacatcatgctgtgctgttcctgccacaaatgcaaaacctgaaccatgtggttgacattttgagggacatttattattttgtaaaacaatgtacctatccctttaaaaattgtcagtttcatgacaaagactaaggaactgttccagattaaaggagaataaagagacaaggcaacgaatgcagttcatgatctgaatgggatactggagtgggaaaaaatgctataaaagacagtgttgggacaaccagaaatttgaatatatagcatgtatttttaaaattgtatcaatataaaatttactgagattgataattgcactgtgtatatgtaagggcatgtcctatttcctaggagctaaaggattaagataaaggggcttggtgtctgcaagtcactttgaagtgttttcggaaaaagtaaagaataaacttaaataataaaaaggtgtgggagcaaaaagagttcatctcaaaagatgggaagccctctaatgccctctactgatagatgttttgtaaaccctagaaggcattcttctgtctcatgtgtgacgggaggatgttcaaggtggtttggtgcatcgtccctgttctatgccgaatttcttcatgtgtatcccaagcccttctcccagcccaggaagttcaaaagaggacgtcatggcctaagggagaagttgtcaaagaggcatttggtgagaccagaaaacaaagataataaaattcctggttttcaaacatgaaaggaaggaaggacaaagctgagtacatgttttggtgtgagaccaaaagatttagaaggaaacttgtggagccagtttttctctctctctctttaaaaaaaaatatatatatatatatttaaaaatttttaaatcatcaagttggtgaaacagtttctctttttactgcttactcctcctgtgctattcctgcttgccaaacacaaaggacaaggacttcatgcagattctccaggccgtgggagttggaagggatgccagcgttcaaccggtgtgggagcctttgtcctttccccatctgtgggccacatccaaggttataggagaagcccctgatgagtttggggctccaaggacagatgagctcatttggcaggggtcctggggaagtaaggatgttccagagcccctccccagcaactcaccccatcacagggcagggaccacatggggcagtgaggaagtagaagtgccagcagatacgtctcagtggagaagtcccaggagatcctgaagtacctggccccagacagatgtgggaatcattccacacactgcctgggagcagagaggcaggtatgtcctgaagagccttgccaacaggacaaaggaagtggacaccagcctcccccgcagctctggccagtgccagcacccagaacctagatgccacctggggagaagttggtggaggaagaaagtcatgctgaattacctgagtcaattgagagcttataatagggattaagtcgagatttagaaaaaaatgaaattttttgtgcatctgagctcacggctcaaaaacatcatatcctaaaaggaattctttttctgtagccagcagagggcacttggagacagcaaaagacctgaagaaaccgccctaatccaatcacaagatcagatgggtttgcttttccctggaaagtagttcagggcgggcaactctgcctcctggaacccccaacatcctcactgtaaacagagtgcttgtttctggggtgcaagttgagaggaaatggccaggaagaaggcctggcccctcacattccagagcccctccttgggaccaggagtctgacgtcccttctggagcttcagtggattctcggggctgctgtggttggcggagggcgggggggtggtggaggggggaaaggcgggtgggtaagggggtgccatgccagatccccaaggactccttaggtggaggagtcttccctcctgagcctgggttcctccgtcccactcttcgtctcaagatgtcctgagtcctccctcagtgtgactcagttccatgctgctctgggaatccagagaggaaccgacacagtcccagcccttgaaaggggctccgtctgcgcaggcagcagaagtggtcatgatgacagtggagggagtccctctgcttggggtctcagaagccacttgaagaaggcatgagcatggtctcagttctccaggggaactggagggaggcattccagaacaagaggacagcgtgtgcacaggcttggggtgcaagtgaagaaattaatcatagaatgaggaggaggccaccttgcctatcatcctgctgcaccaggaagtagaaagacatttttaaaaagtttacaaaacgtattctgtattagagtgcttcccaccttatgaaatcaacccgctcctttctaatgcatcttctttttagaaaatgttttctttgctttttttttctgaaaacatccgaaagtaagagcctttcctccgtactactttagcctgtagttcctaagttctataaagccacagcacgatgactgaatccagggttaaaggaaatgtttgcttggcagtacttgggcattcaccatgccaaatgcccaaagttcaggctgatcctgctctgaagtcccaaagaattgaaaaccagtgagagaaatccaggcctttagcttagaccagcagcctccaggaccagcagcgctgaggctcagcaatgcctgtacatcgatgtgacaagattcaggggaaaaaagtaagagagggaacctagggccccccaagagcagggaagggcagaatccagcagggtttccaagggccaggcagctggtagcagtggggaccattgatagaggagattctcaagtgacaggcaaaggcttaagtacttcttttcaaaaaagaaagaacagtgatgtattgttctcccacacctcaattgcataaactcatagtcctccctggggcctctattaagtcacctgtgacactaaggaccagagtagcagcagtagccttggaccccgactctcctgtttgcatgatttccagccaatggtggcctttgccacccttgggccactagcctatgactggagaagaaattgtactgtgtgtttagctgttccagagttctgcagaaactgtggaagtgacccaccaaagaaagtggagttgcctggctcaggaacccagtatgtaagcacccccaaccccaccagttgtagtcctggctctggtccccctctgctgctgccctctcaaggctcgagtcctgacccagagtgactgttcacaggggtgaagggcagttaatctggtgtaaatagccagccacatctctgggactttacggatgcatagaaccatacttctcaaatcttagtggtgaaagactggtgtgttgttttttaaaatttgtatcatctgtccatcatgggccaatatttttataaaatacaataataaagaatttcaggaaaaataaaatacatccaaagaagtataaaatacaagccaaaattttaaaatattagtttcaacagacattaaattacctttcaaagccaggcacagtggctcacacctgtaatcccagcacttttgggaggccaaggctggtggatcacctaaggtcagggaatttgagaccagcctgaccaacattgtgaaaccttgtctctactaaaaatacaaaattagccgggcctggtagcgtatgcctgtaatctcagctacttgggaggctgaggcaggagaatcgcttgaacctgggaggcagaggttgcagtgagtgagattgtgccattgtgctccagtctgggcaataagagtgaaactccgtctcaaaaaaaaaaaaaaattaccttttaaaaatatgagaacaaacagggaaatataaaagaattatgaggttagtacgtattattcattgaaagtgtacctagagcatttaatacagattcactattatactcctgtcattctgcagttataactaaacaaaaagttacaagtgaagccgtgattttttatattacatacatactctcactttgaatatatatcaatattgaagttttattttttcttttattttcttttttaattatagcaaatattgcctgatacaatattcaagtttttaatgtgataaatgaggattggattcttttaatttatctcagctagttcagattaacaatagtgttatttgcaggggataacatataagcttgtgttttcttttaataacactcacaatagagaaaccagcctcagagagagatgttagttggaaaggaagataagacatttaaagtaattttttggccaaaatttttctatgaggctttgttttacaatctgtaaagtctggctaacaaatgaacaatacaaattttatatctccaacttagataataatattaaactataaatttttaaaaacttgattagaattaacttgatggtaaaagtaacaagttagaaaaataaagaaatgcttgggcaggcgcagtagctcacgcctgtaatcccagcactttgggaggccaagacgggcggatcacctgaggtcaggagttcgagaccagcctggccaaaatggcaaaaccccgtctctactaaaaatacaaaaattagccgggtctgatggtgggcgcctgtaatcctagctactcaggaggctgaggcaggagaatcgcttgaaccctggaggtggaggttgcagtgagcagagatcgcgccactgtactccagcctgggaaacagggcgagactcagtctcaaaaaaaaaaaaaaaagaaaaaaaagaaatgcttacatttgctcagatttttatatgcttttgacttacggttgacaaactaaccttaaaatctcatgggttgtaatgtggtcctcctgcctgtggtcagtttgctgcctgtccacccaaaactcaccattagagtgcaatgacacttgaatggtccacaccattggcatgtacttggacaacgtggcaatgcaaattgcttgaaaagtaaccatttactctcagtttctgttcttatttcatcagggacagtttgtggactggcatgagccataggccaccctttaaggaggatgtctatggtaaaaggcacttttcactagacctaataaacttccagttgctaaatgaggaagtttttttttttttttttgacagagtcttgctttgttgcccaggctggagtgcagtggcgagatctcagctcactgcaacctccgcctcctgggttcaagtgattctcctgcctcagcctcctgagtagctgggactacaggtgcacgccaccacacctgcctaatttttgtattatttttagtagagatgggtttcaccatgttggccatgctagtcttgaactcctgacctcaaatgatctgcccaccttggcctcccaaagtgctgggattacaggcatgaaccactgtgcccagcccaatgaggaaacttttaaaaaataatttgtcatttttgcttttagcaaatcaccctcacggcgcagaggagtgggaagaaggtgatgccttggaatgggccccttcggctcctgtcttcctcagaaccatgccgtctcagctgtttcctgttacctggtacccggttccaggtaaacagactccttcacatctgtgacctccaccaacaagaatcctctacctcacatctgaccaaacctggctggtccctaagaaccctgctgtgggacagattcttcctccacatgttcctgagggctctggtcctttttgctattgcagcctttggcgtgctcctcttccgttatcctctttcaaaacccctgccctgttgaagttcacgtttcccaactgctaccctcaacctccctccctcagcttcttggaggttcccttaattctttgctatgtcaactctgaactctttgtccttttcaccatcttaagtctttctgtcacctggacaacttcagccacccatgaaggatgacccatttggctctgggctcccagttcctctacttcctcatctcttttggccttcatcacccttccatttctgatgagctctcccaaagccatatccttgaacttaccacctgaaatcactcaacttctgaaatttaaaaatcagttaccccactctttcaccacaacctcttggcacctggctctctcagtcagagcattccccctgtgttcttagacctcacagaaacatctagtcccctgcctcctctgcttttctaatttgccatcaactgtgcccccccatccccacaatcttcttactttttcttctatccagcctagactgtgccctataatttcaatactttagttcctaagttttatggtccactgttgcactcaattctggatcattcaactgttcaccttcttttttccagaccaaaccaggactgctggcttccagtgaaaacagtaagtgtgactgccacaaccatgagtgccaaatttatagtttcccacctcagccaggccttcaatgaagccaggtgatcctatgtttctccagtcagctctctctcgttctctatgggcacgatctcaaaccttcctcattcctcactttctgctccatctctctctctctctctctctctcactctcactctcaacaaaatgtatttgccctctttcctaaagaaagcagaagcatcacacaggaattcttccaactttctgggatcaagcctgtaagcttgctacgggctcactcattgctttctctgtcctgtctgctgtaaaggaggttgggttcttcatcccaattctggcccatttctccaccagtaacatggatctcagcccctccctcctcttgtggggccttatttcatccattatgccctcactcacctgtattttaaaaacatccttcaggaggaatttcaagaacaatatcactgatgaatattgatgcaaaaatcctcaagaaaatactagcaaactgaattcaacaacacattaaaaagatcactcatcatgaccaaatgggatttatccctgggatgcaaggatggttcaacatatgcaaatcaattaatgtgatacatcatatcaatggaatgaagaataaaaaccatatgatcattaaaattgatgcagaaaaagcatttgataaagttcaacatctcttcatgataaaaaccctcaaaaaccagggtattgaaggaacatacctcaacataataaaactcacatatgacagacccacagctagtattatgctgagtgggggaaaactgaaaacctttcctcttagatctggaacacaacaaggatgcccactgtcaccactgttattcaacatagtactggaagtcctagctagagcaatcagacaacagaaagaaataaagggcattcaaattggaaagca

SEQ ID NO: 2470 - DNA, 5288 bp, Homo sapiens
ccttcccccaacctagaggtatcacatttttgggtgcgtcattttctgtttggggtggcttaacaagatgagctgatagggttcccaggctgcctggagttacataacccattgtgcttccaggacagctcacaatcttaggatttgccctaacaagcaaactcagaaaactgctgaggaaggcacgggagggtggctgtgcgaggtactgccggggctgagctctcatggaggctctctctgttctctgaagtgcctttggagtttatgtctgcacatggcattggtttttcaattcgggcagcccgtcagggctcagcctctgccaggactctgccacggcaagctcattcggacaaacgcctgtgatgtgtgcaacagcaccgatcttccggaagtcgagatcattagcctgctggaggagcagctgccccattataagttaagagccgacaccatctacggttatgaccacgacgactggctccatacacctctcatttctccagatgccaacattgacctcacaaccgagcaaattgaagagacgttaaaatacttccttttatgtgctgaaagagttggccagatgactaagacatataatgacatagatgctgtcactcggcttcttgaggagaaagagcgggatttagaattggccgctcgcatcggccagtcgttgttgaagaagaacaagaccctaaccgagaggaacgagctgctggaggagcaggtggaacacatcagggaggaggtgtctcagctccggcatgagctgtccatgaaggatgagctgcttcagttctacaccagcgctgcggaggagagtgagcccgagtccgtttgctcaaccccgttgaagaggaatgagtcgtcctcctcagtccagaattactttcatttggattctcttcaaaagaagctgaaagaccttgaagaggagaatgttgtacttcgatccgaggccagccagctgaagacagagaccatcacctatgaggagaaggagcagcagctggtcaatgactgcgtgaaggagctgagggatgccaatgtccagattgctagtatctcagaggaactggccaagaagacggaagatgctgcccgccagcaagaggagatcacacacctgctatcgcaaatagttgatttgcagaaaaaggcaaaagcttgcgcagtggaaaatgaagaacttgtccagcatctgggggctgctaaggatgcccagcggcagctcacagccgagctgcgtgagctggaggacaagtacgcagagtgcatggagatgctgcatgaggcgcaggaggagctgaagaacctccggaacaaaaccatgcccaataccacgtctcggcgctaccactcgctgggcctgtttcccatggattccttggcagcagagattgagggaacgatgcgcaaggagctgcagttggaagaggccgagtctccagacatcactcaccagaagcgtgtctttgagacagtaagaaacatcaaccaggttgtcaagcagagatctctgaccccttctcccatgaacatccccggctccaaccagtcctcggccatgaactccctcctgtccagctgcgtcagcaccccccggtccagcttctacggcagcgacataggcaacgtcgtcctcgacaacaagaccaacagcatcattctggaaacagaggcagccgacctgggaaacgatgagcggagtaagaagccggggacgccgggcaccccaggctcccacgacctggagacggcgctgaggcggctgtccctgcgccgggagaactacctctcggagaggaggttctttgaggaggagcaagagaggaagctccaggagctggcggagaagggcgagctgcgcagcggctccctcacacccactgagagcatcatgtccctgggcacgcactcccgcttctccgagttcaccggcttctctggcatgtccttcagcagccgctcctacctgcctgagaagctccagatcgtgaagccgctggaaggttctgccacacttcaccactggcagcagttggcccaacctcaccttgggggcatcctggacccccggcccggtgtggtcaccaagggcttccggacgctggatgttgacctggacgaagtgtactgccttaacgactttgaagaagatgacacaggtgaccacatttctctcccacgcctagctacctccactccagttcagcacccagagacctcagcgcaccatcctgggaagtgcatgtctcagaccaactccaccttcaccttcaccacctgtcgcatcctgcatccttcagatgagctcactcgggtcacaccaagccttaactcagccccaactccagcttgtggcagcaccagccacttgaaatccacgccggtggccacaccatgcactccacggagactgagcctggctgagtccttcactaacacccgtgagtccacgaccaccatgagcacatccctggggctcgtgtggctgttgaaggagcggggcatttctgctgccgtgtacgacccccagagctgggacagggccggccggggctccctcctgcactcctacacgcccaagatggctgtgatcccctctactccgccgaactcgcctatgcagacacccacatcctccccaccctcctttgagttcaagtgcacgagccctccctacgacaatttcctggcttccaagccagccagctccatcctgagggaagtgagagaaaagaacgtccgcagcagcgagagccagaccgacgtgtccgtctccaacctcaacctcgtggacaaagtcaggaggtttggggtggccaaagtggtgaactcagggcgagcccatgtccccaccttgactgaggagcagggacccctcctctgtgggcccccggggccagcaccagcccttgttcccagaggcctggtacctgagggcctgcccctcagatgccccactgtcaccagtgccatcggtgggctgcagctcaatagtggcatccggcggaatcgcagcttccccaccatggtgggatctagcatgcagatgaaagctcctgtgactctcacctcgggcatcttgatgggtgctaagctctccaaacaaactagcttacggtgaggactggaggggggccggttgccctagaggagacccacgttctcctctcttgctcccacctccctctcttccccccacagtgcactccctccctctgcccttctctgtccaccccctcctaagctagacaaatcaacctcgtgcctaatggaggaagtgtggaaactttgtaaaatgtgtacataggacttggagaccttgtgtccgccctgctctttcttccgatcccacaggaagtgcccctgcactgtcatcactctcacgaggacgtcacctgtgctaacctgggggaaggtggggtcctttcttctttccttttgagaagcactgaaactcccaagtgtgttcttatcccatggataggaaaccagtgaattccgtggctggcacaccacgagctgtcacgcggcacgggtcataacacatctgggtgtcatcggacacctcacctcgcccaccctgtaggagcgtaaggagcctccatcctcagccacgtgcagctgacgtggctttcctgatcggagggcttttcttttatgggtggcccagcttcttcaagaccttcactgctctgcctcagtggacagtcgtttcttttttgaggtgtgaccttttgttttcatgccttccccttgaagtcatcctgtgttttgtaatcagctgtcaggccaaatgtctgacccgaaagagaatgtatttacactcatgctgcgttgttcagcagcccctctgtgttctgtgtgatttgttttatttttccttttttttacatatatatgcagggaagtaatggtactggtagtgtatgttttctatgtggttcaaatatgaatttcgaacacaccaagccgctaatgagatagcagcttttttctgggacccagagtcacaaccaaattgatttaagaccggacccaagacacctttaacaataggactgaaaggaaaaaggatagggaaaaagcttattaaagaaatgtgtcaacaccaaatgtagaggggaagaaccacaaccaggcataataccaaaccggttccagggggaaacaaggctttggtattccgctggctccagcgctttttctgaaacccgaggctggccagggtgctgtcaccatgcggtctttgattgcagccattcaatgcccacatgcttttccttcttgtttcagaacagcacatggtcacaacaagatattttctttccctccaaagccttttgtctccttgtgcctctttttatccttaggaaaagatccaggtgcttgtgaaaagaatcatgaatgcaacaagggaggctggtcctgttgctgtcgccgattaagttttaaacttttatttattatttatgtctgccgtattttaaataaacattctcgttccttccagttccagtcatagtgtgtctgtggcattccagtccaaccatgtgacttatttattctaatttgagggctgcactgtacaccatggtgtcctgtgacaccgtgttccagacatttatggaaggaaaacatcccatataaatgaaactgtcatgctgtgtcctccccggcagcagaagatgtgtccttccattgagtgagggtaaccttatgtccaccaaggatactttgagaaagcccctaaggaacaagcctcagtcccacggtttcagactatttattctctgaacacaagagtattggttaattatgttctcagctctccctgctgttgtatgtgtgcattcactgcaagtaacttatatctttttatttgaatgtattttaaagcagtagatagaataacaaaggaatatgaaaaccatggactgaatggaccattttatgtattcagagagagaagccactcatcattgccagaaataccatgtaaaaattggcagttcagaggttgcaatacttagtatagtaaataaataaacggtcaacattgtgcaaccactaccaaaaagtgtgttgtaatgcatcaaaaatcaacacaattttattcactaatgagtatcaataaaataagttcaaatgatggaaaccacactggtattctgatttgtattttgtttttatcttttcatcaaggagacgatctctttatgtaagacttgaaagtgtttagctctttgcaaaattaaatgaaaggcatatac

SEQ ID NO: 2471 - protein, 947 aa, Homo sapiens
MALVFQFGQPVRAQPLPGLCHGKLIRTNACDVCNSTDLPEVEIISLLEEQLPHYKLRADTIYGYDHDDWLHTPLISPDANIDLTTEQIEETLKYFLLCAERVGQMTKTYNDIDAVTRLLEEKERDLELAARIGQSLLKKNKTLTERNELLEEQVEHIREEVSQLRHELSMKDELLQFYTSAAEESEPESVCSTPLKRNESSSSVQNYFHLDSLQKKLKDLEEENVVLRSEASQLKTETITYEEKEQQLVNDCVKELRDANVQIASISEELAKKTEDAARQQEEITHLLSQIVDLQKKAKACAVENEELVQHLGAAKDAQRQLTAELRELEDKYAECMEMLHEAQEELKNLRNKTMPNTTSRRYHSLGLFPMDSLAAEIEGTMRKELQLEEAESPDITHQKRVFETVRNINQVVKQRSLTPSPMNIPGSNQSSAMNSLLSSCVSTPRSSFYGSDIGNVVLDNKTNSIITEAADLGNDERSKKPGTPGTPGSHDLETALRRLSLRRENYLSRFFEEEQERKLQELAEKGELRSGSLTPTESIMSLGTHSRFSEFTGFSGMSFSSRSYLPEKLQIVKPLEGSATLHHWQQLAQPHLGGILDPRPGVVTKGFRTLDVDLDEVYCLNDFEEDDTGDHLPRLATSTPVQHPETSAHHPGKCMSQTNSTFTFTTCRILHPSDELTRVTPSLNSAPTPACGSTSHLKSTPVATPCTPRRLSLAESFTNTRESTTTMSTSLGLVWLLKERGISAAVYDPQSWDRAGRGSLLHSYTPKMAVIPSTPPNSPMQTPTSSPPSFEFKCTSPPYDNFLASKPASSILREVREKNVRSSESQTDVSVSNLNLVDKVRRFGVAKVVNSGRAHVPTLTEEQGPLLCGPPGPAPALVPRGLVPEGLPLRCPTVTSAIGGLQLNSGIRRNRSFPTMVGSSMQMKAPVTLTSGILMGAKLSKQTSLR

SEQ ID NO: 2472 - DNA, 5026 bp, Homo sapiens
gatgctgggccaggagctttgtgtacacccctccacttcagctgagccagggcatgtctgcggcccaggccagggcgcagtgtgtgccctgggggcccaggcctgcatggctcctctgggtagggggtcgggggcacccccaaggatggtcccttagggtgatgttttggctttggggtgacttcagcaatgtccctgcgagacaagggcggggaagaagaatgttttgaatacgactgccaggatgaagagaggaagccaacccacaggcagcatgacacccaggacctcttggaagaggttttatgtgctgaaagagttggccagatgactaagacatataatgacatagatgctgtcactcggcttcttgaggagaaagagcgggatttagaattggccgctcgcatcggccagtcgttgttgaagaagaacaagaccctaaccgagaggaacgagctgctggaggagcaggtggaacacatcagggaggaggtgtctcagctccggcatgagctgtccatgaaggatgagctgcttcagttctacaccagcgctgcggaggagagtgagcccgagtccgtttgctcaaccccgttgaagaggaatgagtcgtcctcctcagtccagaattactttcatttggattctcttcaaaagaagctgaaagaccttgaagaggagaatgttgtacttcgatccgaggccagccagctgaagacagagaccatcacctatgaggagaaggagcagcagctggtcaatgactgcgtgaaggagctgagggatgccaatgtccagattgctagtatctcagaggaactggccaagaagacggaagatgctgcccgccagcaagaggagatcacacacctgctatcgcaaatagttgatttgcagaaaaaggcaaaagcttgcgcagtggaaaatgaagaacttgtccagcatctgggggctgctaaggatgcccagcggcagctcacagccgagctgcgtgagctggaggacaagtacgcagagtgcatggagatgctgcatgaggcgcaggaggagctgaagaacctccggaacaaaaccatgcccaataccacgtctcggcgctaccactcgctgggcctgtttcccatggattccttggcagcagagattgagggaacgatgcgcaaggagctgcagttggaagaggccgagtctccagacatcactcaccagaagcgtgtctttgagacagtaagaaacatcaaccaggttgtcaagcagagatctctgaccccttctcccatgaacatccccggctccaaccagtcctcggccatgaactccctcctgtccagctgcgtcagcaccccccggtccagcttctacggcagcgacataggcaacgtcgtcctcgacaacaagaccaacagcatcattctggaaacagaggcagccgacctgggaaacgatgagcggagtaagaagccggggacgccgggcaccccaggctcccacgacctggagacggcgctgaggcggctgtccctgcgccgggagaactacctctcggagaggaggttctttgaggaggagcaagagaggaagctccaggagctggcggagaagggcgagctgcgcagcggctccctcacacccactgagagcatcatgtccctgggcacgcactcccgcttctccgagttcaccggcttctctggcatgtccttcagcagccgctcctacctgcctgagaagctccagatcgtgaagccgctggaaggttctgccacacttcaccactggcagcagttggcccaacctcaccttgggggcatcctggacccccggcccggtgtggtcaccaagggcttccggacgctggatgttgacctggacgaagtgtactgccttaacgactttgaagaagatgacacaggtgaccacatttctctcccacgcctagctacctccactccagttcagcacccagagacctcagcgcaccatcctgggaagtgcatgtctcagaccaactccaccttcaccttcaccacctgtcgcatcctgcatccttcagatgagctcactcgggtcacaccaagccttaactcagccccaactccagcttgtggcagcaccagccacttgaaatccacgccggtggccacaccatgcactccacggagactgagcctggctgagtccttcactaacacccgtgagtccacgaccaccatgagcacatccctggggctcgtgtggctgttgaaggagcggggcatttctgctgccgtgtacgacccccagagctgggacagggccggccggggctccctcctgcactcctacacgcccaagatggctgtgatcccctctactccgccgaactcgcctatgcagacacccacatcctccccaccctcctttgagttcaagtgcacgagccctccctacgacaatttcctggcttccaagccagccagctccatcctgagggaagtgagagaaaagaacgtccgcagcagcgagagccagaccgacgtgtccgtctccaacctcaacctcgtggacaaagtcaggaggtttggggtggccaaagtggtgaactcagggcgagcccatgtccccaccttgactgaggagcagggacccctcctctgtgggcccccggggccagcaccagcccttgttcccagaggcctggtacctgagggcctgcccctcagatgccccactgtcaccagtgccatcggtgggctgcagctcaatagtggcatccggcggaatcgcagcttccccaccatggtgggatctagcatgcagatgaaagctcctgtgactctcacctcgggcatcttgatgggtgctaagctctccaaacaaactagcttacggtgaggactggaggggggccggttgccctagaggagacccacgttctcctctcttgctcccacctccctctcttccccccacagtgcactccctccctctgcccttctctgtccaccccctcctaagctagacaaatcaacctcgtgcctaatggaggaagtgtggaaactttgtaaaatgtgtacataggacttggagaccttgtgtccgccctgctctttcttccgatcccacaggaagtgcccctgcactgtcatcactctcacgaggacgtcacctgtgctaacctgggggaaggtggggtcctttcttctttccttttgagaagcactgaaactcccaagtgtgttcttatcccatggataggaaaccagtgaattccgtggctggcacaccacgagctgtcacgcggcacgggtcataacacatctgggtgtcatcggacacctcacctcgcccaccctgtaggagcgtaaggagcctccatcctcagccacgtgcagctgacgtggctttcctgatcggagggcttttcttttatgggtggcccagcttcttcaagaccttcactgctctgcctcagtggacagtcgtttcttttttgaggtgtgaccttttgttttcatgccttccccttgaagtcatcctgtgttttgtaatcagctgtcaggccaaatgtctgacccgaaagagaatgtatttacactcatgctgcgttgttcagcagcccctctgtgttctgtgtgatttgttttatttttccttttttttacatatatatgcagggaagtaatggtactggtagtgtatgttttctatgtggttcaaatatgaatttcgaacacaccaagccgctaatgagatagcagcttttttctgggacccagagtcacaaccaaattgatttaagaccggacccaagacacctttaacaataggactgaaaggaaaaaggatagggaaaaagcttattaaagaaatgtgtcaacaccaaatgtagaggggaagaaccacaaccaggcataataccaaaccggttccagggggaaacaaggctttggtattccgctggctccagcgctttttctgaaacccgaggctggccagggtgctgtcaccatgcggtctttgattgcagccattcaatgcccacatgcttttccttcttgtttcagaacagcacatggtcacaacaagatattttctttccctccaaagccttttgtctccttgtgcctctttttatccttaggaaaagatccaggtgcttgtgaaaagaatcatgaatgcaacaagggaggctggtcctgttgctgtcgccgattaagttttaaacttttatttattatttatgtctgccgtattttaaataaacattctcgttccttccagttccagtcatagtgtgtctgtggcattccagtccaaccatgtgacttatttattctaatttgagggctgcactgtacaccatggtgtcctgtgacaccgtgttccagacatttatggaaggaaaacatcccatataaatgaaactgtcatgctgtgtcctccccggcagcagaagatgtgtccttccattgagtgagggtaaccttatgtccaccaaggatactttgagaaagcccctaaggaacaagcctcagtcccacggtttcagactatttattctctgaacacaagagtattggttaattatgttctcagctctccctgctgttgtatgtgtgcattcactgcaagtaacttatatctttttatttgaatgtattttaaagcagtagatagaataacaaaggaatatgaaaaccatggactgaatggaccattttatgtattcagagagagaagccactcatcattgccagaaataccatgtaaaaattggcagttcagaggttgcaatacttagtatagtaaataaataaacggtcaacattgtgcaaccactaccaaaaagtgtgttgtaatgcatcaaaaatcaacacaattttattcactaatgagtatcaataaaataagttcaaatgatggaaaccacactggtattctgatttgtattttgtttttatcttttcatcaaggagacgatctctttatgtaagacttgaaagtgtttagctctttgcaaaattaaatgaaaggcatatac

SEQ ID NO: 2473 - protein, 887 aa, Homo sapiens
MSLRDKGGEEECFEYDCQDEERKPTQHDTQDLLEEVLCAERVGQMTKTYNDIDAVTRLLEEKERDLELAARIGQSLLKKNKTLTERNELLEEQVEHIREEVSQLRHELSMKDELLQFYTSAAEESEPESVCSTPLKRNESSSSVQNYFHLDSLQKKLKDLEEENVVLRSEASQLKTETITYEEKEQQLVNDCVKELRDANVQIASISEELAKKTEDAARQQEEITHLLSQIVDLQKKAKACAVENEELVQHLGAAKDAQRQLTAELRELEDKYAECMEMLHEAQEELKNLRNKTMPNTTSRRYHSLGLFPMDSLAAEIEGTMRKELQLEEAESPDITHQKRVFETVRNINQVVKQRSLTPSPMNIPGSNQSSAMNSLLSSCVSTPRSSFYGSDIGNVVLDNKTNSIITEAADLGNDERSKKPGTPGTPGSHDLETALRRLSLRRENYLSRFFEEEQERKLQELAEKGELRSGSLTPTESIMSLGTHSRFSEFTGFSGMSFSSRSYLPEKLQIVKPLEGSATLHHWQQLAQPHLGGILDPRPGVVTKGFRTLDVDLDEVYCLNDFEEDDTGDHLPRLATSTPVQHPETSAHHPGKCMSQTNSTFTFTTCRILHPSDELTRVTPSLNSAPTPACGSTSHLKSTPVATPCTPRRLSLAESFTNTRESTTTMSTSLGLVWLLKERGISAAVYDPQSWDRAGRGSLLHSYTPKMAVIPSTPPNSPMQTPTSSPPSFEFKCTSPPYDNFLASKPASSILREVREKNVRSSESQTDVSVSNLNLVDKVRRFGVAKVVNSGRAHVPTLTEEQGPLLCGPPGPAPALVPRGLVPEGLPLRCPTVTSAIGGLQLNSGIRRNRSFPTMVGSSMQMKAPVTLTSGILMGAKLSKQTSLR

SEQ ID NO: 2474 - DNA, 2827 bp, Homo sapiens
gatgctgggccaggagctttgtgtacacccctccacttcagctgagccagggcatgtctgcggcccaggccagggcgcagtgtgtgccctgggggcccaggcctgcatggctcctctgggtagggggtcgggggcacccccaaggatggtcccttagggtgatgttttggctttggggtgacttcagcaatgtccctgcgagacaagggcggggaagaagaatgttttgaatacgactgccaggatgaagagaggaagccaacccacaggcagcatgacacccaggacctcttggaagaggttttatgtgctgaaagagttggccagatgactaagacatataatgacatagatgctgtcactcggcttcttgaggagaaagagcgggatttagaattggccgctcgcatcggccagtcgttgttgaagaagaacaagaccctaaccgagaggaacgagctgctggaggagcaggtggaacacatcagggaggaggtgtctcagctccggcatgagctgtccatgaaggatgagctgcttcagttctacaccagcgctgcggaggagagtgagcccgagtccgtttgctcaaccccgttgaagaggaatgagtcgtcctcctcagtccagaattactttcatttggattctcttcaaaagaagctgaaagaccttgaagaggagaatgttgtacttcgatccgaggccagccagctgaagacagagaccatcacctatgaggagaaggagcagcagctggtcaatgactgcgtgaaggagctgagggatgccaatgtccagattgctagtatctcagaggaactggccaagaagacggaagatgctgcccgccagcaagaggagatcacacacctgctatcgcaaatagttgatttgcagaaaaaggcaaaagcttgcgcagtggaaaatgaagaacttgtccagcatctgggggctgctaaggatgcccagcggcagctcacagccgagctgcgtgagctggaggacaagtacgcagagtgcatggagatgctgcatgaggcgcaggaggagctgaagaacctccggaacaaaaccatgcccaataccacgtctcggcgctaccactcgctgggcctgtttcccatggattccttggcagcagagattgagggaacgatgcgcaaggagctgcagttggaagaggccgagtctccagacatcactcaccagaagcgtgtctttgagacagtaagaaacatcaaccaggttgtcaagcagagatctctgaccccttctcccatgaacatccccggctccaaccagtcctcggccatgaactccctcctgtccagctgcgtcagcaccccccggtccagcttctacggcagcgacataggcaacgtcgtcctcgacaacaagaccaacagcatcattctggaaacagaggcagccgacctgggaaacgatgagcggagtaagaagccggggacgccgggcaccccaggctcccacgacctggagacggcgctgaggcggctgtccctgcgccgggagaactacctctcggagaggaggttctttgaggaggagcaagagaggaagctccaggagctggcggagaagggcgagctgcgcagcggctccctcacacccactgagagcatcatgtccctgggcacgcactcccgcttctccgagttcaccggcttctctggcatgtccttcagcagccgctcctacctgcctgagaagctccagatcgtgaagccgctggaaggttctgccacacttcaccactggcagcagttggcccaacctcaccttgggggcatcctggacccccggcccggtgtggtcaccaagggcttccggacgctggatgttgacctggacgaagtgtactgccttaacgactttgaagaagatgacacaggtgaccacatttctctcccacgcctagctacctccactccagttcagcacccagagacctcaggtgagaggtcccaagcacgtgtgactgtctcaggcagcagaagttacccgagccggcctcaggcttccccagaggagatgcaggagccgccagcggccacggaggaggaggaggaggaggaggaggaggaggaggaggggtctggtgagggcaccacgataagtcctgtaaacttggcacctttcccggaggcagagttttgggccattctcacctctgttccaggcaccatccgtagtggttctctgtctgtagcttccgctcgtctgtgtgggtgatgattaaagcattctcattgcacagttctgtttttaaatacagagtctgatgcctcctatttgtaacaatgggtgtagctcccctgcccatcttggaggtgcatggcccatcagggatctttaaagtgggagcaggaaaggctgctaaaaaaaaaaaaaaaaaaaaaagtgggcttttgggtccctgaaaacatcagtgcccttcttcctggtctgggtgtctccctgagtctaaggggaagattctcaagtcccctggtgatttccaagtggagctgagcagttttagggaaattgagtgctgggtcattcagaaggtaaatgagatcatctgttacctgtacgctgtattaaaatagaaccaggaaaggctcaggatttcagacatttcgtcagccttttcactttcccagcttcaatggaggtatatatgtcattttcttttcagcttacacatgtgttcaaagtggatttttaaaaagtgttttagcaatactccttaaccaaataaaccttcggagaacgtcactaagcttttccagagagaagaccctagatgaagttggaaaag

SEQ ID NO: 2475 - protein, 678 aa, Homo sapiens
MSLRDKGGEEECFEYDCQDEERKPTQHDTQDLLEEVLCAERVGQMTKTYNDIDAVTRLLEEKERDLELAARIGQSLLKKNKTLTERNELLEEQVEHIREEVSQLRHELSMKDELLQFYTSAAEESEPESVCSTPLKRNESSSSVQNYFHLDSLQKKLKDLEEENVVLRSEASQLKTETITYEEKEQQLVNDCVKELRDANVQIASISEELAKKTEDAARQQEEITHLLSQIVDLQKKAKACAVENEELVQHLGAAKDAQRQLTAELRELEDKYAECMEMLHEAQEELKNLRNKTMPNTTSRRYHSLGLFPMDSLAAEIEGTMRKELQLEEAESPDITHQKRVFETVRNINQVVKQRSLTPSPMNIPGSNQSSAMNSLLSSCVSTPRSSFYGSDIGNVVLDNKTNSIITEAADLGNDERSKKPGTPGTPGSHDLETALRRLSLRRENYLSRFFEEEQERKLQELAEKGELRSGSLTPTESIMSLGTHSRFSEFTGFSGMSFSSRSYLPEKLQIVKPLEGSATLHHWQQLAQPHLGGILDPRPGVVTKGFRTLDVDLDEVYCLNDFEEDDTGDHLPRLATSTPVQHPETSGERSQARVTVSGSRSYPSRPQDEEMQEPPAATEEEEEEEEEEEEGSGEGTTISPVNLAPFPEAEFWAILTSVPGTIRSGSLSVASARLCG

SEQ ID NO: 2476 - DNA, 3019 bp, Homo sapiens
gattccctataaggagcccctgctggtgcaccagaactaccgggggccatctgcccaactgccccagactctggcagtggggcccccgatggcagtgggcacctccccgtgaaacctgccaagctggacgccacagctctgcacgacgacactttggccaactccgtgcccccttcggaggcatgcaaccatgcagtcctagcctgcagcctgggcatccctgaggaacactacataagcgaggctgtggaagatgctcccagctacagagggtaccgggatgcctgcaccattactgatgtgtgcaacagcaccgatcttccggaagtcgagatcattagcctgctggaggagcagctgccccattataagttaagagccgacaccatctacggttatgaccacgacgactggctccatacacctctcatttctccagatgccaacattgacctcacaaccgagcaaattgaagagacgttaaaatacttccttttatgtgctgaaagagttggccagatgactaagacatataatgacatagatgctgtcactcggcttcttgaggagaaagagcgggatttagaattggccgctcgcatcggccagtcgttgttgaagaagaacaagaccctaaccgagaggaacgagctgctggaggagcaggtggaacacatcagggaggaggtgtctcagctccggcatgagctgtccatgaaggatgagctgcttcagttctacaccagcgctgcggaggagagtgagcccgagtccgtttgctcaaccccgttgaagaggaatgagtcgtcctcctcagtccagaattactttcatttggattctcttcaaaagaagctgaaagaccttgaagaggagaatgttgtacttcgatccgaggccagccagctgaagacagagaccatcacctatgaggagaaggagcagcagctggtcaatgactgcgtgaaggagctgagggatgccaatgtccagattgctagtatctcagaggaactggccaagaagacggaagatgctgcccgccagcaagaggagatcacacacctgctatcgcaaatagttgatttgcagaaaaaggcaaaagcttgcgcagtggaaaatgaagaacttgtccagcatctgggggctgctaaggatgcccagcggcagctcacagccgagctgcgtgagctggaggacaagtacgcagagtgcatggagatgctgcatgaggcgcaggaggagctgaagaacctccggaacaaaaccatgcccaataccacgtctcggcgctaccactcgctgggcctgtttcccatggattccttggcagcagagattgagggaacgatgcgcaaggagctgcagttggaagaggccgagtctccagacatcactcaccagaagcgtgtctttgagacagtaagaaacatcaaccaggttgtcaagcagagatctctgaccccttctcccatgaacatccccggctccaaccagtcctcggccatgaactccctcctgtccagctgcgtcagcaccccccggtccagcttctacggcagcgacataggcaacgtcgtcctcgacaacaagaccaacagcatcattctggaaacagaggcagccgacctgggaaacgatgagcggagtaagaagccggggacgccgggcaccccaggctcccacgacctggagacggcgctgaggcggctgtccctgcgccgggagaactacctctcggagaggaggttctttgaggaggagcaagagaggaagctccaggagctggcggagaagggcgagctgcgcagcggctccctcacacccactgagagcatcatgtccctgggcacgcactcccgcttctccgagttcaccggcttctctggcatgtccttcagcagccgctcctacctgcctgagaagctccagatcgtgaagccgctggaaggttctgccacacttcaccactggcagcagttggcccaacctcaccttgggggcatcctggacccccggcccggtgtggtcaccaagggcttccggacgctggatgttgacctggacgaagtgtactgccttaacgactttgaagaagatgacacaggtgaccacatttctctcccacgcctagctacctccactccagttcagcacccagagacctcaggtgagaggtcccaagcacgtgtgactgtctcaggcagcagaagttacccgagccggcctcaggcttccccagaggagatgcaggagccgccagcggccacggaggaggaggaggaggaggaggaggaggaggaggaggggtctggtgagggcaccacgataagtcctgtaaacttggcacctttcccggaggcagagttttgggccattctcacctctgttccaggcaccatccgtagtggttctctgtctgtagcttccgctcgtctgtgtgggtgatgattaaagcattctcattgcacagttctgtttttaaatacagagtctgatgcctcctatttgtaacaatgggtgtagctcccctgcccatcttggaggtgcatggcccatcagggatctttaaagtgggagcaggaaaggctgctaaaaaaaaaaaaaaaaaaaaaagtgggcttttgggtccctgaaaacatcagtgcccttcttcctggtctgggtgtctccctgagtctaaggggaagattctcaagtcccctggtgatttccaagtggagctgagcagttttagggaaattgagtgctgggtcattcagaaggtaaatgagatcatctgttacctgtacgctgtattaaaatagaaccaggaaaggctcaggatttcagacatttcgtcagccttttcactttcccagcttcaatggaggtatatatgtcattttcttttcagcttacacatgtgttcaaagtggatttttaaaaagtgttttagcaatactccttaaccaaataaaccttcggagaacgtcactaagcttttccagagagaagaccctagatgaagttggaaaag

SEQ ID NO: 2477 - protein, 634 aa, Homo sapiens
MTKTYNDIDAVTRLLEEKERDLELAARIGQSLLKKNKTLTERNELLEEQVEHIREEVSQLRHELSMKDELLQFYTSAAEESEPESVCSTPLKRNESSSSVQNYFHLDSLQKKLKDLEEENVVLRSEASQLKTETITYEEKEQQLVNDCVKELRDANVQIASISEELAKKTEDAARQQEEITHLLSQIVDLQKKAKACAVENEELVQHLGAAKDAQRQLTAELRELEDKYAECMEMLHEAQEELKNLRNKTMPNTTSRRYHSLGLFPMDSLAAEIEGTMRKELQLEEAESPDITHQKRVFETVRNINQVVKQRSLTPSPMNIPGSNQSSAMNSLLSSCVSTPRSSFYGSDIGNVVLDNKTNSIITEAADLGNDERSKKPGTPGTPGSHDLETALRRLSLRRENYLSRFFEEEQERKLQELAEKGELRSGSLTPTESIMSLGTHSRFSEFTGFSGMSFSSRSYLPEKLQIVKPLEGSATLHHWQQLAQPHLGGILDPRPGVVTKGFRTLDVDLDEVYCLNDFEEDDTGDHLPRLATSTPVQHPETSGERSQARVTVSGSRSYPSRPQDEEMQEPPAATEEEEEEEEEEEEGSGEGTTISPVNLAPFPEAEFWAILTSVPGTIRSGSLSVASARLCG

SEQ ID NO: 2478 - DNA, 3979 bp, Homo sapiens
ccttcccccaacctagaggtatcacatttttgggtgcgtcattttctgtttggggtggcttaacaagatgagctgatagggttcccaggctgcctggagttacataacccattgtgcttccaggacagctcacaatcttaggatttgccctaacaagcaaactcagaaaactgctgaggaaggcacgggagggtggctgtgcgaggtactgccggggctgagctctcatggaggctctctctgttctctgaagtgcctttggagtttatgtctgcacatggcattggtttttcaattcgggcagcccgtcagggctcagcctctgccaggactctgccacggcaagctcattcggacaaacgcctgtgatgtgtgcaacagcaccgatcttccggaagtcgagatcattagcctgctggaggagcagctgccccattataagttaagagccgacaccatctacggttatgaccacgacgactggctccatacacctctcatttctccagatgccaacattgacctcacaaccgagcaaattgaagagacgttaaaatacttccttttatgtgctgaaagagttggccagatgactaagacatataatgacatagatgctgtcactcggcttcttgaggagaaagagcgggatttagaattggccgctcgcatcggccagtcgttgttgaagaagaacaagaccctaaccgagaggaacgagctgctggaggagcaggtggaacacatcagggaggaggtgtctcagctccggcatgagctgtccatgaaggatgagctgcttcagttctacaccagcgctgcggaggagagtgagcccgagtccgtttgctcaaccccgttgaagaggaatgagtcgtcctcctcagtccagaattactttcatttggattctcttcaaaagaagctgaaagaccttgaagaggagaatgttgtacttcgatccgaggccagccagctgaagacagagaccatcacctatgaggagaaggagcagcagctggtcaatgactgcgtgaaggagctgagggatgccaatgtccagattgctagtatctcagaggaactggccaagaagacggaagatgctgcccgccagcaagaggagatcacacacctgctatcgcaaatagttgatttgcagaaaaaggcaaaagcttgcgcagtggaaaatgaagaacttgtccagcatctgggggctgctaaggatgcccagcggcagctcacagccgagctgcgtgagctggaggacaagtacgcagagtgcatggagatgctgcatgaggcgcaggaggagctgaagaacctccggaacaaaaccatgcccaataccacgtctcggcgctaccactcgctgggcctgtttcccatggattccttggcagcagagattgagggaacgatgcgcaaggagctgcagttggaagaggccgagtctccagacatcactcaccagaagcgtgtctttgagacagtaagaaacatcaaccaggttgtcaagcagagatctctgaccccttctcccatgaacatccccggctccaaccagtcctcggccatgaactccctcctgtccagctgcgtcagcaccccccggtccagcttctacggcagcgacataggcaacgtcgtcctcgacaacaagaccaacagcatcattctggaaacagaggcagccgacctgggaaacgatgagcggagtaagaagccggggacgccgggcaccccaggctcccacgacctggagacggcgctgaggcggctgtccctgcgccgggagaactacctctcggagaggaggttctttgaggaggagcaagagaggaagctccaggagctggcggagaagggcgagctgcgcagcggctccctcacacccactgagagcatcatgtccctgggcacgcactcccgcttctccgagttcaccggcttctctggcatgtccttcagcagccgctcctacctgcctgagaagctccagatcgtgaagccgctggaaggttctgccacacttcaccactggcagcagttggcccaacctcaccttgggggcatcctggacccccggcccggtgtggtcaccaagggcttccggacgctggatgttgacctggacgaagtgtactgccttaacgactttgaagaagatgacacaggtgaccacatttctctcccacgcctagctacctccactccagttcagcacccagagacctcagcgcaccatcctgggaagtgcatgtctcagaccaactccaccttcaccttcaccacctgtcgcatcctgcatccttcagatgagctcactcgggtcacaccaagccttaactcagccccaactccagcttgtggcagcaccagccacttgaaatccacgccggtggccacaccatgcactccacggagactgagcctggctgagtccttcactaacacccgtgagtccacgaccaccatgagcacatccctggggctcgtgtggctgttgaaggagcggggcatttctgctgccgtgtacgacccccagagctgggacagggccggccggggctccctcctgcactcctacacgcccaagatggctgtgatcccctctactccgccgaactcgcctatgcagacacccacatcctccccaccctcctttgagttcaagtgcacgagccctccctacgacaatttcctggcttccaagccagccagctccatcctgagggaagtgagagaaaagaacgtccgcagcagcgagagccagaccgacgtgtccgtctccaacctcaacctcgtggacaaagtcaggaggtttggggtggccaaagtggtgaactcagggcgagcccatgtccccaccttgactgaggagcagggacccctcctctgtgggcccccggggccagcaccagcccttgttcccagaggcctggtacctgagggcctgcccctcagatgccccactgtcaccagtgccatcggtgggctgcagctcaatagtggcatccggcggaatcgcagcttccccaccatggtgggatctagcatgcagatgaaagctcctgtgactctcacctcgggcatcttgatgggtgctaagctctccaaacaaactagcttacggtgaggactggaggggggccggttgccctagaggagacccacgttctcctctcttgctcccacctccctctcttccccccacagtgcactccctccctctgcccttctctgtccaccccctcctaagctagacaaatcaacctcgtgcctaatggaggaagtgtggaaactttgtaaaatgtgtacataggacttggagaccttgtgtccgccctgctctttcttccgatcccacaggaagtgcccctgcactgtcatcactctcacgaggacgtcacctgtgctaacctgggggaaggtggggtcctttcttctttccttttgagaagcactgaaactcccaagtgtgttcttatcccatggataggaaaccagtgaattccgtggctggcacaccacgagctgtcacgcggcacgggtcataacacatctgggtgtcatcggacacctcacctcgcccaccctgtaggagcgtaaggagcctccatcctcagccacgtgcagctgacgtggctttcctgatcggagggcttttcttttatgggtggcccagcttcttcaagaccttcactgctctgcctcagtggacagtcgtttcttttttgagtagatagaataacaaaggaatatgaaaaccatggactgaatggaccattttatgtattcagagagagaagccactcatcattgccagaaataccatgtaaaaattggcagttcagaggttgcaatacttagtatagtaaataaataaacggtcaacattgtgcaaccactaccaaaaagtgtgttgtaatgcatcaaaaatcaacacaattttattcactaatgagtatcaataaaa

SEQ ID NO: 2479 - protein, 947 aa, Homo sapiens; identical to SEQ ID NO: 2471

SEQ ID NO: 2480 - DNA, 173500 bp, Mus musculus
  misc_feature (1)...(173500): n = A, C, G or T/U
agacagatgctgcaagaattccccccagtgctgctgtatcccaagagttgtatgagccaggactggagccttcagcgactgccaagctgggtgacttacaacgttcctgggaaaccttaaaaaacgtggtaagtctttaaagcgttgaactgttcaagctcctcagacatccatcgctttcagtatcatcttatgaaatgcacgcagagttacacatctaggagacagtcagatgcccttgagtaaagctgtgaggaaagaaatgtcacaacctgcaagataagaagcaggaagctgttggtaaggtctcttttcttgttcagatcagtgagaaacagcggactctctacgaagttttggaacgccagcagaagtaccaagactctctccaatccatctcgactaaaatggaggccatggagatgaagctaggtgagagcctcgagcccagccggagtccagagagccagatggctgagcaccaggtaaaaatagcaatctcaatgacttcagcttcctgcgagatggattcagagtacactgtagctggcctgtcaggctcctcgtggggagaacagggcagcagttcttgttggagtgagcaagattccaaaaggtgggagttgccaccactccttcagggtgggtggggtctaagaaggaaacagaggaaatcagacctggattctaattttagaaaactacatgcgttggtgttgcttggggatttttctgatactagctgtcttttcttctagttgccagattgattttgtttagttatgagcctttgttgtaagaacaaatatgaaatttatatcccaaattggcctcatcagggaatgctccccagatttcagtgggaaagagttctaagttttcatcttgtgttgctctgactccagtcatttttcaaagcttatgcaagttagagaaagagtcaagatctatgtgaagaaagagctgattccataaatctaatttagaaagatgctacccaaaaggcaacagcttaaaatgtatgctaaaatcacacatggcgagtgggcactgccagtgagacctactcagtgctttaatgtcacttatgtggcaaaactgaggtctaaggatgtggagacctgctttagtctgggtgctgagtccacacgacataggaaagtactgcacaatgctaattaggacccagcagcatatgacagtcccccccccccaaaagcagagggcaagaaagatgtttttagttgttaattgacctataggccccatagattgatgcatggtgctttttgcctagaatccaggttcagttcctagcaccctcctggtggttcacaaccacgtataactctagtatcagggatctgatatgatcttctgacctctaggctatcagacacacaagtggtgcatatgtatgtgtgtatacatacatatatacatacacacacacacacacatggaccaaacagtcctagacataaaagtaattacatgtaactgaacaaaaaaagccaggtgttcagtacacatcaataattctagcacacaggaaatgaaagagcagtccagtgcaactagacccacttaggggaccatcacagaacagagcaggagctggagaggcggctcagtgggtaagagcacttcctgcttcccagcacccctctgagagattcatggctattcaaatctcttgctccagaggatcagatgccctcttctggcctcttcagacaaccccacacacgtggcacttacacagaaacacatgtacacatatataaacaataaaatatgaatcttaagagagagataaaagcgcaaagtgacagacatgtctgttagagacagcacagcttatcagctttagaaacgaggctatagagctgtgattcacgcgcgcacacacacacacacacacacacacacacacacacacactaccgctctacactccatttggactctactataaacgtggacttcatggtgtgctgtccagtacgagcgctttcttttgcaatacaccgcctttcactttaagataaaaatgtacacattccatctaaagatggcatattgagaaatagtggtttcaggcttttgaaactcttgtaacttcttagggtaggtgttaaatacacaggatagacctattttagaccttttgacaaactatgttttagatacactagagtgccccgcagtctgcctggcttgggaaacatggctacaaacatggcatatgatcttctattagatcataacagtcatgaggacgatccagcactcacgtgactattgccacactgttctctctgactgccatccattgtcttgctagagtactgtcacctccagacatccctgtcccttactagaggggccatagtgttatgttcttgcctgatggacctgttttccttcaagcatccaaagagaatatggaatgagttatctaggagcagtatttatcagggtaattcaagagccacacatattattgagaaccagtgatctgggagaaggtttaaattgtttcattctgtctatctttaggttatctctacctcttttggaggcttatcatccctataaacctaggtaactgaccacagctcccccaacacccagctaaaattgtacattattgctgcttattatgaatcagaaagacatcaaataacttctcttgcagctgaagccatgactttctgtccttttgctgttcctgaagacagtgcctcccatgaccacagtgagacaacatagctcatttaatgacgaacgtaagctagacatcacagcttaggtagcttattaatggcctaatggagggtgaggagacacagagcacatgcaatttggtgcagttgtgtatataccctgcactctagcttcttcttcctgggccatctttgttcgcttccaatgtctgttcctaagttctacaaattctggggcaaagctgcctacacgaagagctagtgccgacacactatctaaatctgtccctggagtcaggaacagtccttcattatagatcttctatttctaaattccaactgaacagtggtggagaagtccaggatgcttgtttatactttaaaggaattgatagaaatgttttgcttcttattttcctgaacgctgccataaggattatttcttattgatctaattcttacaaggttctcagcctatgggtctcaacccctacaagggttacaggtcagatatcctgcatatcacatatttatattgtaattagtagtaatagcaaaatgacagttatgaagtagccacaaaagtaattttatggcttgaggtcagcacagcatgaggaactgcactaaaggtttgcagcattaggaaggttgggtaccactgctccggactcttgcctcaatgtgcttcctcagtctggttggtgctttcaggcccctctctctccagttaggctctctatgatgtataatgggcacaggacccagtgcagttcgaatgatggtgatgtgtgtttgaatgttataccctgtggttggaatttgagccattttctatgttttttttttcataaaattttattgatacttgtaaatttcacatcatgcacctaatcccactcttcccatatctgccctccactctataaccccccaaaggaaataaaaacaaaaatgaaaaacaaacaacaacaaagcacctcaccatggaagctgcggtgtgtcatagtgtgtcacacaatctgcccttttgcccaaacagcttgcagatgttcattacaatgagtcattggtctggtttgaggcctctggcttctgctccactgtcaatgctgggtcttcggagactcctctcggatatcctgctgtggccctgagtcatggagaccctgcagctttggatctgcaggatcagccctttcacatacctgagcagctcataggtggggtaggtgttatggagggccagctcaaagtcctggatctgggcctgggtagtagctcagtttgtcagcctgccagctttcccagactgcccaggtaaggggtggggtgtcgggcatttggcatctttaccacactcagctcagtgacaggctttgggacaagttctgaggctattttattctaacaaatgaatcatggaaacaattgtactcaaaggtatagcctggagactgagtagagttactcttttcttttggaatggaataaacttaagttccatgtggccctactattaaaggattgggcttgggtgaagctccaagtatttgtcttgcattaaaatattagtggatgggtatcttaatgggagtcagtatgattttctaaaatttattatatatgtatatataagtatacatgtgtgtatgtgtgtgtgagagagagacagagacagagagagatacacacacacacatacannnnnnnnnnnnnnnnnnnnnnnnnnnnnnnnnnnnnnnnnnnnnnnnnnnnnnnnnnnnnnnnnnnnnnnnnnnnnnnnnnnnnnnnnnnnnnnnnnnnnnnnnnnnnnnnnnnnnnnnnnnnnnnnnnnnnnnnnnnnnnnnnnnnnnnnnnnnnnnnnnnnnnnnnnnnnnnnnnnnnnnnnnnnnnnnnnnnnnnnnnnnnnnnnnnnnnnnnnnnnnnnnnnnnnnnnnnnnnnnnnnnnnnnnnnnnnnnnnnnnnnnnnnnnnnnnnnnnnnnnnnnnnnnnnnnnnnnnnnnnnnnnnnnnnnnnnnnnnnnnnnnnnnnnnnnnnnnnnnnnnnnnnnnnnnnnnnnnnnnnnnnnnnnnnnnnnnnnnnnnnnnnnnnnnnnnnnnnnnnnnnnnnnnnnnnnnnnnnnnnnnnnnnnnnnnnnnnnnnnnnnnnnnnnnnnnnnnnnnnnnnnnnnnnnnnnnnnnnnnnnnnnnnnnnnnnnnnnnnnnnnnnnnnnnnnnnnnnnnnnnnnnnnnnnnnnnnnnnnnnnnnnnnnnnnnnnnnnnnnnnnnnnnnnnnnnnnnnnnnnnnnnnnnnnnnnnnnnnnnnnnnnnnnnnnnnnnnnnnnnnnnnnnnnnnnnnnnnnnnnnnnnnnnnnnnnnnnnnnnnnnnnnnnnnnnnnnnnnnnnnnnnnnnnnnnnnnnnnnnnnnnnnnnnnnnnnnnnnnnnnnnnnnnnnnnnnnnnnnnnnnnnnnnnnnnnnnnnnnnnnnnnnnnnnnnnnnnnnnnnnnnnnnnnnnnnnnnnnnnnnnnnnnnnnnnnnnnnnnnnnnnnnnnnnnnnnnnnnnnnnnnnnnnnnnnnnnnnnnnnnnnnnnnnnnnnnnnnnnnnnnnnnnnnnnnnnnnnnnnnnnnnnnnnnnnnnnnnnnnnnnnnnnnntggatgctgggccagaagttgggaagggaggacagcctgagcagtgcagaactgacagttccaaggagccaaaccacactttttcttactgaagaatattcagagaaggagatagaagcagaagccagggacgtcaccacacccccgatcagccgaatcaactgagatttaatgaggagttgtgttttttctttctggtcatttcttatatgaattaggcaccaactgtattatgagttagaattaattcacttagatgtctcgaacaccccctaggccaacagccaaaagactggctttttataaatatatgatttgaaagtaactgggggtgaatcaccagcatggtgtggagaaaacagaaatattattctgagctatataagaaaaaagggagtagggagtagattaagagacatctagcccacatgtagggcgagaattggaataataacaggtgggaggaaggcactgtatgcacagctgtgagaaggtggaggagagtgagggggaggatgagtgtggcttacaactgcagaagaggaggagacataatgaggcctgttctctaattatagaggaggctaaaatctgaacaaataatacagagtttttattttttgacaatcgggtcttcagcaagtgatcataattaataatgcatgaaactactttgaatgaacaattaagagagtcagtctataaagtcaatgagatctcaaaaatccttcacccccaactctgggcatgttgctgacacctataaataatgaggcagggattgcacattcaaaggcacccatagattatatggttcgataaaagatgttgcaaatataagaaaactatatctcaacagaacagaagttctcgttgggtgtagtggcaaggatatacaaccccagaatttgtcaggcagaagcaggagaatcaggagtttgaggccatcctcttacacaacaaattggaggtctgatctatgtagtccctgtttcaaaacaaacaaccaaagagacacaagcaaatgaacaaacaatccccatcctccacacccaggaagggagaagatagctaaagttgaaaaataagggggctgaagagatagctaagaacactgactgctcttccagaggtcctgagttcaattcccagcaaccacatggtgactcattgtaatgagacctgacaccctcttctggtgtgtctgaagacagctacagtgtacttatatacactcaaaataaataagtcttaaaaaaaaagaaagaaaagaaaagaaaaagagaaaaagaagtcctaccacttagagtactggttcccaaccttcctcatgcctttaatacacttctttatatacttctttatacacttctttaataacctccgtttaatacacttctcatgctgcggtgacccccagtcataagattatttttattgctgtaacagtaattttactactgttacaaatcataatgtaaatatctgataatcaggagatctgatctgtgattcctaaagggacctccacccacaggttgagaaccactgacttacagagatttacaaagctctaaggatgaagagagagcatcctttgcacagcagtgagcttccaagaacagatgcatgtggctcagagcaagattatactgcaaggtagaaaggggagagaagggaggggcaaggcaagaaggaaaggtggtggtacctccatttgtacacacgctgggaacaaaggagtgtgataaattaaactagattatagtagacctaagtacgaagttagcattaaaaaaaaagataaatgaactcttatgatgctgctgaccatagtgccatagtgatgacgtttttcttaatttctgacccatcatataccaaccaacagtttttcaaattaaataaaattctcttcttgtcatgatgatgccagatggttgtaaagtttcttaactcgtgttttccatattcctatctcctcataacctctctggaagcttttgaaaaagtaacaccattccatttattaatcatgttctcatttgttttcatttgagtcctggggagcctagggctataggatgctaagccctatttctgccactgaagctacttaacactccttactcaatatccctcttaaagatggggtgccacataataatcctgatgcaggaggccaagttttctcaaacagaccacccaaagctcgaactattaaggaaaaaaatattattctgtaatcatatttaaaacttctattttagctgggagtggtggtgcatgcctttaagtcccagcaaaggcaggtgggtctttgggaattggaagcaagttggcagtcttacatagtgagttccaccatgacagccaagactgcacactggggctaggctcaagaaaacaaaacaaatctaaaacacaactttcttatcatcaaaagaaggccccattgaagaaatcttcttgctgctaatggagaaacaaacactgttggagcagacatctataatacagggaagctaaagcagccggcacctaggaaggacagactccagggagatcgggcagagacttagaaggccaccatagaggaggattctgtcgtaggcatcaacaacaggaaactgcagaatgaaacgccagaggcttctactaggaacccaggaaaaagctcgaagcgacagtgattcacagagcagttggcagtgggatagtaaacaaagctgaaagtgagcagctctccccagggagagtaaccctagagtagctctctgtccacatagcagcttactcacagaaatggcaagcctagggcagacatgtttgcctatccacgggtgactgggaagcctggaggtaaccacagggaagaagtcaaaagggccttgccatggtcgggaaatccaagttatttcctggtcggtatggtagcgccctgggggtgtacagcttgtgcagaaccatggagctgtgcccccatttcctgtctaggtctatgtgatatcttggatgtaacaatcagttaaaattcagttggtcacactattagggaagagaggtgtttctttcttgttcatttttaaaattattttaatgtaatcagtttttaaatgcaattattttaattctttaatgttattttaattgttttaatattattgacctttgaggaggtactgtgcctactgtgatgtctgtagtctgtggaagaactaatacaagcaaaggtaccagtttggtccgtgctacatgttgtttcactgggccacaggtatctttcctatactacctagctttatgataggctgtttaatttctaagtaggaattttccctgaagactccggtctcaaaaaaccacaaaactaaataaaaggtaaatagatggagttggctggttagatggatggatggatggatggatgggtgggtgggtggatggatgacctatatagtactggggatgtaccattagtagcctgactgcctaaggatgcacaaacccctacgtcaaatcctaggagcaatggaacagtgaatttggtagtgtgagcttgcaatctcagtggaggcagggatgaccaggattaaagtcaccccaagctataaagagagtttcagggcagcctgagctacaagaaaccctgtctcgaaaacaaaaacaaggttgggtgtattgttccataccttaatctcaacaccagggagggaggtatctagtctacgtgagttttagcccatccagggctatatagttaagactttatctcaaaaataaaccagaccagaattaaggaatagatagtaagttagtcatttcaaaattcttttccttttaagggcagggctgggaggcaggatagacaaggtggcatttaggagttactttaaatcactcttgtttaagggttaaagcagagagctttgttatcttgtgtggtgacactggacagtttgcagatttgattgctatctcttcattcttggaatgctgacaaacgcattgctctctatctggtgacagggaatttcagcatagtgactacgccaatttgggtttttaatcttttgttttgtgggccagtgaaggagcctgtcctaaaagcagagccatcatctgtaattgctatttaaagctacatactatgattggcatgccattgaactgtgcaagctgagtgaagtggctgggttaggggtctgccttggaggtggtcagcttcagaaagcatctgaaaccttggcagacaatgctggagaaaggcaatggcctggaaattactaccaggaaacagtgagctttttgggttaggtacagaaggaagagaatgaatgtggacgtacttgaagattcctctcctgttacgagtgagcgtgttggaaaccagaaatgctaattaatttgttggaagccatttaagttagttacatccccagcatccaggtcagaactgtcccagcttccagctccacaatgtcattctgaaaagttaaactcagtgacagtcctgacctctgtctggctcagctgatgacatcaaagtgagagtctgccgttgcccccagtgggtgtgtggtggcaaggcctgaagtcctcagtcaagagcgtgatcccacagtcttccccacaggccctgatggacgaggtgcagatgctacaagacgagatcaatgggctccaggtgtctcttgctgaggagctggtggccgagtctcaggagtcggaccccgcggagcagctagctctgcagtccacgctcactgtcctggctgagagaatgtccaccatcaggatgaaagcagctggcaagcggcagcttctggaggtaaatggggccttggaggggtttcaggtcccacttctgaatcaagctttagcgtccgttagcagttctgggtaccaatgtgaaccacatgggttttgttgttgaaattactggtattctctttggtatatgtatttttcaaacttttattctctttcccctctgcccctccctcttccttctccctccnnnnnnnnnnnnnnnnnnnnttcccctctccctctccccctcctcactcacaccctgttaaacgtgtctgccctcatatctccatattctcacatgttcttattcccatcggtcccctttgtctgcctaaaaagttttacttcttgccaagctagggggatacccaggggcccccacctgctcagagaagaagggggtgtatgaggaaaggatttagggaggggttgacctagaggggggcaatgagcagaacgtaaagtgaataaataaaaaataaaattactttaaaaatgttttacttctactttcatgtcatatatatgcctagttttatatatctgtgtatggggaacaccggagagaaggggtatagtaattgtctgttggcaataagcataattcactttatgtaattaccttcattcatgtcaatctttctgctaatgatgtcattatattcttacttatggctgtaaatattcccttgtgaacacacacacaccccacacatgtatgcacttcacataacattttccttacccatgatctgttgttgggcacctaggctggctccatactttggcagttgtgagcattgcagtagacattggagggagagcgttccttactgtttcccagccctaggaagctggtactgtgttaccccaggggctggatcacagggcacagtcagtcaggatggatctatggctgtgccccagaggagagacactgagaatgcagagagctggtctttggttgactagagtctcatggacaggagctgtagatctgagcaatggtttgctatgtttaagtaagagcctacaatgaacagaattcattctgtgaggcataaacctgctcaccattagtcaatccaggcatattaacttgtgaaaatacttttttacttctgttgcctatgctatttgctttaaatattatttaataggtagtctttggtaacaatgatatatgtggtaaaaatcagctgttcttttctttatattttcttccctataattattggcttttggcacatgcgatgtctatgcagctacttctgcaattcatttgagtgtgggcttcagatgagctctgagagcttctggcttctcttatctctggatcataatgtccccaatatatttctttttgtttttgtttgtttgtttgtttggtttttgttttttcgagacagggtttctctgtatagccctggctgtcctggagctcactttgtagaccaggctggcctcgaactcagaaatccgcctgccactgcctcccgagtgctgggattaaaggcgtgcgccaccacgcctggccccgatatatttcttatgcacactgaatattattttatttactactgattccatcatgattacatatatgattgttctatactgaagatgtaagctcgttgtaaattggctagccacaagatccagcaaatcgtgtagctattccatattctgcataagcttaaaatattgttttcctacttaactagtccccgtgttaagatctggaaccagagacaggacctgagtcgttaagaggtatcactatcattgcagaggccctgagtccagctcccagaaaacgcacagtggctcacagccagttccaggaagtctttttctggccttttcagcacacacacatggtgctcagataaatgtgtatacaaaacacttttacacataaaattaaatacatgttaaaaataataatgacaattactagtgatacagtttttaaaaggaggtgtttgaaggacttaaaggggactttttcatttcatcatattgccattactctatggaaagtgtatgtaggttttcagaataagtttggcctgaatgtttcagcatgaattacttgcatgaattgagaaaacttgatacttagcctaaaaccctgtgtttctgccttattccaactcaagtacacctagctgctcctttccacaggactaaccgcctaaattgttgctcatttatgtggagttgatatctcttagtcagctgctgtcccaagcatgccctaccttggctgaaattgagggcaagtgtctgttgtcatgggccaactgcttcctgtcactgtctggttctaacccttgactgattccctcatttccatgactgccagattctataggaatcttgaggatgcctcgttcaactctggggcacatacattcatggtggggggagggagggggcaaaagggactcatcacatgctaatgctgagacacagaaaccccaannnnnnnnnnnnnnnnnnnnccagggatgtcgctctgttatacgggaccttttaagttcccagtgttcagtgctccctccaacccctccttttctcctcaggagaagctaagtgatcagctggaggagcagagacaggagcaggctctgcagaggtaccgctgcgaggcagatgagctggaccactggctgctgaacactaaggctaccctggatgttgcactgggtacatcccaggagcccatggacatggatgcccagctggtggactgccaggtacaaagatgctctagtgatgtggttctcagcctgtgggtcgagaccccttcaggagtcacacaccagatatcctatcctgtatatccgctatttacactatgaatcaaaccagagcaaaattatgaagtaggaacaaaataattttatggttgggggaggtcaccagaacatgagtaactgtactaaagggtctcagcattgggaaggttgagagccactgctctacatgatgaagggaaggacatgtgcctacctcgtgaaggacactttaaaaatgcaggtaatatacccataaggtcctgatatagacatatgagcttccacaagtttgagactttacatatttacagagtccatcattacagcaaaaataaaattcaaatctggaattggttcttatcaacattgccagtggtatctcgtctttaaaaatattgagggactagagagatggctcagcaggtaagagtgatccctggtcttccagaagatctgtgctcagttcccaacatccgtatcaggtgactgcttgcctgcaactccggctccaggggatccggtgcctctgggcgagggtctgcactcacgtgcacatatgcatagtcacataactggaaaaaaagatctaaaacagaactgaaaatagtttttaaagagaatttcaccatagtggtttacatctctaagtctgtaatcctagtatttgatatcaacgcttttttctcttatagttatttaagtcttactttgtagtcctcttgacccagaatgcattatgtaacacaggctggcctcagagtccaccccagtgctgggagtgcagaccactgaggctggctaaactcttagcttcttgactaccattttataaaactatagataccaggatatttatagtgtctgtatttaatggctaaaaagaaatataaactagccttgcagtagttgcgcatgcctttaatcccagcatgcaggaggcaaaggcaggtggatctctgagttccaggctagcctggtctacagagtgagttccaggacagcactcaaaaaacaaaacaaaatataacaaaacaaaacaaaataaccaactgaccaaagaaatgtgaactaaataagaagaagtagtatcagtaagtcaaactgaaataaatgtaattaattggaagcccacaagagtgctctgttgccattttgaacacagtcctcacacggtacctgagaagccagtgttaggaaaccagggagtctgctgtctttccaaaggtgcagtgtgcttccctccgtgtcaggtttctaagaactgacataagttggggggggggggtgtccttaaaggttatacaacctaagagctgttccagaaaagagttctgggcttggtttgacctttggtttgattctgggaatcaaatccagacactttattactgcgttagccccccagctccttagatgttgtcaacgtcaatgtgtcttttttctccctccnnnnnnnnnnnnnnnnnnnnnnnnnnnnnnnnnnnnnnnnnnnnncctccctcccctctttgcatttttttcttttcttctcttttctcaagaaatagcatggaccaaacttaagagcctcatttgctaggcaagggccccatcactgtgttataaccctagccttacatagaggtcgttattgttattatttattatagatactggtgctgacttcttgctactataaaaaagaaatccctgagataatcaacttaaaaagcagaaaggcttgtttccatactgttgaaaggtcttgcccatacactccagcactgttttagacaggcagagcacatagaagaaggcctgctcattcattgtttggtacgaaagggaaggataaatataagcatccacaatccacttaaacaaagtacctaaaatcccccctaaggccccgtttcataaaggtttttatctccttcaaataggaccaagccgaggaccaaactcttaatgcctgcctgtaggagccattccagatccaatatagcacgaaacagtaaacctgtatgtgtccaccatcaaacttcatgattattaacatattacacttcctatgtgagtgaaatatgattgaaatctttcatccaaatggctggggagatggcctagcagctaagagcactggctgctcttccagaggacctgagttcaattctcagcacacacagttacttccatctgtaaccctagtctcaggggacctgatgcccccttctggcctcctcaggcaatgcatgtgtgttgaacagatgtacatgcaggcaaatgatcactatcatttaggtcacactttaatgctttaagtgtttctctatgtgccaggaacatcattctctggcctgataatagagagtaaacgagtgggttggaacatattctattattcctagcctcttttctacagtcagaagttgtggcatcaatttaaatgtttcctttaggggttaagattaacacccaagctagtgtttcagccaagctattgtgccaacccctctttcggatgtatatgttttcaaagaaattcacaaagcctacagaaagctgaccctattctgacagtacagctcaggacgtttacaaagcagtaaaatgtgttttcatagcatttaaaggaattagcactgaaactaaacagatcaaccaacttgatttttcaaatctaatatttatttgaaatcattcaaaatacagatatgaatccagtttaaagttagaccctagtaagttatggacatgttaaagaaaatctaatgaatttaaaatctagaattaaaaaaatcttcataattataattggctgtgacataggattggagtcacatgggaggcgtagtggtatccatctttaatgccagcatttgggagacagtacaggagaatctctaggagattaaggctagcctgaactacatcaagagatccaggataacctagggttacatagtgagatcctgtctcaggaaaagaaagaaagagacagagacagagaaggatggcgggaagaagggaaggaaagagaccaagaaagagagagacagacagacagacagacactggtcctggccttgagcatttgaaacatcagagcccaccctcagtgacacacttcctccaacaaagccacacctcctaacagtgccactctctatgagcctatgggagccattttcatctaaaccaccacagaactctgtttcaaagagtttagaggctaagttcataaaaaaaacaacacaatttatgtagaaaaataaaatggttatttattttcagtcttctgtttttcccagttttataaaagatcttacttttaaagaaagagataatttctctttagtctcaatcttagaggaaaaactttaatatttgtgatggagatgagaaaaatatttttaaatataagatcaaaatgggtcctatttttaaaaagaagatgacagaagctgatcgtggtacgataaaacccataatttcatctctggggatgctaaggcaggaggattgcaatttagtaggcagcatggtcttcaagatcaatggtttgaaagaaattcctttttaagtcaacaagaagtttgttgtgtgataattctactaactttagtaatctaatgctaaggtaatgagactaataatggagcagcatttgggcagcagccctttctttgtgcttgttcactatgccaaatgtgttttccatatgactcttccaatgtatttttaattataaagtgtctacttaagagagagagagagagagagagagagagagagagagagagagagagaaggtaagacatgtaggcacccctgcccctccccaagcacataccttattcttcaaagcagaagaagccagatacctgcctactgtggaaagtgacgattgaaggctgtgcttagaaacaggggctgtcaagatgtgagaattctgtccctgctgtgtttttccagaacatgctggtggaaatcgaacagaaagtggtggccctgtcgcagctgtccgtgcacaatgagaacctgctgttggagggcaaggctcacactaaagaggaggccgagcagctagcggtgaagctgaggctactcaaagggagccttggagagctgcagagggccctgcatgacagacagctcgacatgcaggtgagcatggctacctagcctgggctggcatggcacttgtgacacacttaccacatacatctctgtgagtgtggcagtggagaggaaatgttggagctgaatacacatctatgcaggcttggtttcagtaacacatcggcatgtatattttcactctgccttgggtctgggtttccagctttgctgttagcattgattgaccagtatgtggatctgagcatgaaaggtgccctccttttcctgtcctcttccctnnnnnnnnnnnnnnnnnnnnnnnnnnnnnnnnnnnnnnnnnnnnnnnnnnnnnnnnnnnnnnnnnnnnnnnnnnnnnnnnnnnnnnnnnnnnnnnnnnnnnnnnnnnnnnnnnnnnnnnnnnnnnnnnnnnnnnnnnnnnnnnnnnnnnnnnnnnnnnnnnnnnnnnnnnnnnnnnnnnnnnnnnnnnnnnnnnnnnnnnnnnnnnnnnnnnnnnnnnnnnnnnnnnnnnnnnnnnnnnnnnnnnnnnnnnnnnnnnnnnnnnnnnnnnnnnnnnnnnnnnnnnnnnnnnnnnnnnnnnnnnnnnnnnnnnnnnnnnnnnnnnnnnnnnnnnnnnnnnnnnnnnnnnnnnnnnnnnnnnnnnnnnnnnnnnnnnnnnnnnnnnnnnnnnnnnnnnnnnnnnnnnnnnnnnnnnnnnnnnnnnnnnnnnnnnnnnnnnnnnnnnnnnnnnnnnnnnnnnnnnnnnnnnnnnnnnnnnnnnnnnnnnnnnnnnnnnnnnnnnnnnnnnnnnnnnnnnnnnnnnnnnnnnnnnnnnnnnnnnnnnnnnnnnnnnnnnnnnnnnnnnnnnnnnnnnnnnnnnnnnnnnnnnnnnnnnnnnnnnnnnnnnnnnnnnnnnnnnnnnnnnnnnnnnnnnnnnnnnnnnnnnnnnnnnnnnnnnnnnnnnnnnnnnnnnnnnnnnnnnnnnnnnnnnnnnnnnnnnnnnnnnnnnnnnnnnnnnnnnnnnnnnnnnnnnnnnnnnnnnnnnnnnnnnnnnnnnnnnnnnnnnnnnnnnnnnnnnnnnnnnnnnnnnnnnnnnnnnnnnnnnnnnnnnnnnnnnnnnnnnnnnnnnnnnnnnnnnnnnnnnnnnnnnnnnnnnnnnnnnnnnnnnnnnnnnnnnnnnnnnnnnnnnnnnnnnnnnnnnnnnnnnnnnnnnnnnnnnnnnnnnnnnnnnnnnnnnnnnnnnnnnnnnnnnnnnnnnnnnnnnnnnnnnnnnnnnnnnnnnnnnnnnnnnnnnnnnnnnnnnnnnnnnnnnnnnnnnnnnnnnnnnnnnnnnnnnnnnnnnnnnnnnnnnnnnnnnnnnnnnnnnnnnnnnnnnnnnnnnnnnnnnnnnnnnnnnnnnnnnnnnnnnnnnnnnnnnnnnnnnnnnnnnnnnnnnnnnnnnnnnnnnnnnnnnnnnnnnnnnnnnnnnnnnnnnnnnnnnnnnnnnnnnnnnnnnnnnnnnnnnnnnnnnnnnnnnnnnnnnnnnnnnnnnnnnnnnnnnnnnnnnnnnnnnnnnnnnnnnnnnnnnnnnnnnnnnnnnnnnnnnnnnnnnnnnnnnnnnnnnnnnnnnnnnnnnnnnnnnnnnnnnnnnnnnnnnnnnnnnnnnnnnnnnnnnnnnnnnnnnnnnnnnnnnnnnnnnnnnnnnnnnnnnnnnnnnnnnnnnnnnnnnnnnnnnnnnnnnnnnnnnnnnnnnnnnnnnnnnnnnnnnnnnnnnnnnnnnnnnnnnnnnnnnnnnnnnnnnnnnnnnnnnnnnnnnnnnnnnnnnnnnnnnnnnnnnnnnnnnnnnnnnnnnnnnnnnnnnnnnnnnnnnnnnnnnnnnnnnnnnnnnnnnnnnnnnnnnnnnnnnnnnnnnnnnnnnnnnnnnnnnnnnnnnnnnnnnnnnnnnnnngctagaatggctgggactggggacttgagtctggtgtgctggctccttgaggtgccattgtgtgtcttgttccatcctgcaaagtttccatctaatctgctttgtctccctggcctgagtgagccagggtctctgagattctgcagtgacagtgttctccagtctcttgtgctagagccccactcacctaaacctctactttccagaaacccactatttatctttgggagaaattcctgggaaggggggatgcttagagaatgaggagaatgagacgtgatgagtcacctactccaaacgtgttgcaagatacaaatagcatcttttagaccaaggacactctcattgttctacctgatctggcttctccaggatccaaaggaaaaggaaatacgtgctcagaccacaggagctcatgtggggtcggagactacaccttctacatttgtaaaaaaaaaaaataaataaataaaaaaaaaaatatatatatatacacatatatatatacatatatatatatatacacacacacacatatatatatatatacatatatatgtatatatatatatgtatatatatatatatatatatatatatatatatacatatatatatatacatacatatatatatatactgtagctgtcttcagacacaccagaaaagagtatcagatcccattacagatgtttgtgagctaccatgtggttgctgggatttgaactcgggacctttgggagagtagttagtgctcttaactgctgagccatctctccagccccatcttctacatgttgatagcttgcttcaccacagagtggtcaaaccaaggtacagagataaagatgtagtctgtcatctcattaagtccaccattgttttagggtgtccattgctgtgatgaaacaccatgaccaaagccacttggagaggaaagagtttatttggcttctgtatcctgaatcacacttcatcgtggggagcgtgaattcactcaggacaggaccctggagtcaggagctgatgcagaggccatgaaggagtgccgattaatggcttgctctgcatgagcttctcagcctgctttcttatagcactcgagagaactcacagcaggttgcccctcccatattaatcactactacgaagatgctccatagtcttgcctacagctttttcttagggaggcattctctcgattgactgaggttccctcctctcagatggctctagcttgtatcaagctgacataaaactagccagcacaactatgaatcatgggattgcaggaaagaaaacacaagtatagaaacccaacgctctttccctggagcagtgggtaagagtgcaggactccgaggaaaggcagagcctctgtgtaagctgcagaactggaaggctgagttcttatcttatctgccttcctacttggggttggggcaagggacggggaagggttggtctcagggttgatagcaagatgacccaggtagatgcctcaccagactctagccacaaaggcctcttccatgctggttctcaattacgtctcttcacagggccacactggggccatagggggtcgtagctgttctccagttctgggatgccctcccctagatctgtgccaggttttctacttttccatgctccctgaacttcttcccctctgacagtgctcacagaccagcctagcaagcctttcccatcactttctgtccctttacctcctgcccccccactccctcccccaacttaactcagccttgctggtgcatttgttagctatctgggtcttgacccaggcccttctctggttgcttctcgcatagaactctgagctgcaattgcagtgtctcatgcatcatatgtatttaaagggtgaactgtatatatatatatatatatatatatatatatatatataatctgatctatttcttcatatactcaggctctgaatcctcagcgggtctcagtgtgaagcatgaggctaggtgggccttcgacatcccattagaataaggcaagaagtttgtctgggtgataagtgactgcttttttgtttcgtccctagccaaactcccaaagnnnnnnnnnnnnnnnnnnnnnnnnnnnnnnnnnnnnnnnnnnnnnnnnnnnnnnnnnnnnnnnnnnnnnnnnnnnnnnnnnnnnnnnnnnnnnnnnnnnnnnnnnnnnnnnnnnnnnnnnnnnnnnnnnnnnnnnnnnnnnnnnnnnnnnnnnnnnnnnnnnnnnnnnnnnnnnnnnnnnnnnnnnnnnnnnnnnnnnnnntgtgcccacagttagctgacacttgactatgttattctcctgtacccctcaaccccggctcacacacacacacacacacacacacacacacacacacacggtttctctgtgtaactctggctgtcctagaactcactctgtagacaaggctggccttgaactctgaaatccacatatttttgcctcctgagttctggggttagaggcatgcaccactgtcacccagtttattttgctaattctaatggcactgaaagactcttgtttggacaggagctatttaatactgggggcaactatcagaggaaagggtttctctgttatgtagcccaggctattctggaacttactgtgtagaacagactggccttcaactcacagagatacacccgcctttgcctccaggctactgggaactatttattatacagacgtatataattagctctttttgaataacatacattcaaaaatcaagagtcctagaattaattcaagtcttaggagattcataggtggagctgggagccattttctactttctttataaatttattttataagcatttttatattcttaatttttatagcttcttacagttttgcttcatctttgaaacttttagacatacatagagtgtacagtgtcgatcatgtctgcttcttatttcccctcctcagcaggtcccaggacccttataacatctctcccaacttgatgtccttttttaattttaattttttaatgtcctgaatccagttagtgctgcctccttatgagtgtagtgttgtcggggttggggtgagttaaggctttcctgcctcttgaagtgtcccggtgattatcgccccagccccctccgaggttgaccacttcctgcaactcttgaaaacagagttgaagaggcaaggctggggcgggtgggggtggggaagccaaggatgttcagccatcttggaagcccttgctgcaagttattaagctctgccgccttgtgacaaaatgactgatggagacaactttagggaatgagagacttggtttttttgctttgtgttttcagaagtttgactcaatgacacacttactaatgatagtggcaaggcaaagatatcatggcttaagggcaaggcaaagctttaaaactcaggcaaggaaagaaaaagtacccttcaaatgccactaatgaccctttcccggtgggctgcttttctccttgttccacctcttttcagttgtccaccccgatttttaatccatgggtagattaatactgtggattttggcagagccctcaagacctaacagacacaaggagcagttatgccttcctattctcccatgtgccctgtacccagccaaagtccacagccagcattaaccttcatgtcttgctcttcttgaattctagaatgtgaacccaaccgtggatttactgtttctcaaaggtgttgatctctttggttgataacctttaaaaaaaaaacaaaaaacaaaaacaacaaaacaaaaaaacaaaaactgtttaagaagcaaggacttgctactgtgcccattttggatagataacatgagagaaatgttggccgggcgaagcttttagaggagggacaacaaagtttgacatgtaatgattatctgggtagcattttacctttgtgtgattttaatatgttcataaaagggttgagttttatatttatgtggaaaaaatttagaataatacttgaagactactctggaaaaatgggcttccttagaaataaccctggacataatcacctgcttactcttgttcctaaaagtctcaaagtcttgtgtcaccatcacttttttaatggagtgcaatgatggtgatgaagtcattatcccaactacaccaaaggagttgtctttccagtgaggtgaggttttcctgtgagtggtttcaaccctaggacaagggactgaggtgcatagtgtaggtaccaaagcaaacctggcctccaggttctcccagcatccttcagtccctacctgacatactcctccccctcccccaaccctaaactttccagccctggggctgggcaccattccactgtataatccagcattctttgtctccttgttcagtctctctccctctctctctcctcctccctctgacacccacactttttctctcctttaccatcatctcctctgtctccctttcaatggcaacttccctctcctccttccttggggccagagaactcgcccgccccagagcagcctcccaataaacctacacttcatataatctatttggcttgaattggctcatttcatcggcagagaaacaacttttcagtgtggcccctgattcctgtcttatcttgttcaaagcagggagtcacacaagagaaagaggagaacgatgttgacttcacagacacccagagccccggcgtgcaggaatggctggcacaagcccgcaccacaaggacccaccagcggcagagcagcctccagcagcaaaaagtaaagccttttccaccttcctgtgggcatctctgccatgagcagagcttgcgggcagtgtttctgtgaccgtaggttttgttgacatgagttttgttttgttctggtttcaatgctgggaacggaacccaggccaggcctgggatccacatcccagcatggatatgggtcttgagtagttctttgatgcaatgtttgcttctattttactataacacaaaagccccagcaaggcttctgagaatgggcaaagctctgaaatgcatttttctccccaaagaaatgaaatgtgtttcctattttctagtagactcctcacaagacccaattgtaaatggatgtgatacaaatgatttcagtcgattaatttttttaaggaaactaactcagtgtaaaaggaatacataagtaccttctcatgtcaaagtgtaaactcacttactgtgagtgcacgcaactcagattggctgataatcaagtttaactgtcctgaactgatgtttgtaaggagtctgtcctggctagtctgagacagctttgactttgaaaggaaagaatatatttcaccacatgagggcgctgttgtccagcaaaaattttctgttcctgttgctttttcagtatatttaatcagaacaagagtatttgcctaaactgtgctcagatttacagttattagagccctccttacgttctgaggaaaggaagcagtgacggtgacagccaccatcaactgctctctgaagtgaccataacgtttgcgtttgtgcaggagttcgaacaggagctggccgagcagaagagcctcctccgctcagtagctagccgtggagaggagattctaacccaacattccaccgcagaaggttcaggtggccttgggtatgttttgaaattgcaacttccttttctcgtgtttctctgtcatttgaaaaaaacggaacaccttgctccatagttactttccacacaaggcactgacaccgcccccccccccccattcactttaggatattaaatgtctctgcactgccaagcattttgctgtgcagatagaaaaatggctgctgataatgactaatgagtttgccttcctggaggcccagcacacatatcattttctgagtcaaatgtgttatcaaatcacatctgtgatatttccaactgatgactatacctaatcagagtgttttcctcttgagaactcctgcagaatattcttaagaagtaaaaataataataaaaaggatgtatatgcaggctaagtggtagacttccaaacagctttcttcctataatccctacatataaagttttttatcctggggagtaggattggaatggacactttgaaagtcttacatacagaaagatgaaatattcgactagacttctcaacaggaggtttttatttgcaagctggaaaggtaacagggctacagccagtggggtatgcctgtgacttgaaccacggaccttgggtgtcttggcttgcttacctacagagttatgataatacggagcaaccatcaagacaaaatgttttgataatgatacaaagaaaaccctttccttttatttgtttttgccatgacaggtattctctggtttccctagaactcactctatagatgaggctggcctcaaattcacagagatccacctgcccctgcttcccaagtgctgggatcaaaggtgtgtgcagcaccacccagctcggaagcaccttttgttcctaggggtcagtaaagacctgagtgtctgagtgcagtctttgcttgtttctcttggctctttctccttgtgctttgtttcctgattctaaaccctgtttcagcaaaataatataaaaaagagtagatgttagaaagatgttataagatattatttataatgtcaaataattgaaaaggcaggagtacctactagcatcaagaaaaaaattacaacatggtatcagaaatcttacatgtggaagctgaggaacattgtgaattgaaacaacacattgtattcaaatggatcactggagataacagatgtggctactaaagtgtttttgtagtttactcaacactgactccgtgattctgagtgttgatatattgcagatattatgggatgcgtagttttgacatttaggtctccccaaatctgtgaaagctgaaataattgctaccgtccaccaagtttagaaagatccgtgataaggtctttaaaatacatcagcagcaaagccccaaatgaaggggacgctcgtctaggctagtagagcagcgtgtcttttctctcactacccactaagcagctctgaggcattcgcacatctacagtttctcaagccctttatttatatctctgcttttgagaaggagacagctagtgagtgccgtctgcttggcagacagtcggttccacaaaagagctatgggaatcttgtgcaagtttcttgtggttaaaaagaaaaaaaaaatgttgctgttgttttttgctcccttctccttggccttcagcgttggctagagcccagacaacagataaacatctacaagttgctttagttgctctttcaaatattaaactcgtgtaaaaagaaatctgtcttgcatggtagctttctgtgaagattaactttaaaagagtggttcaagatcttgaaccacttcggaattcttcaatggttatacaaactccttagaaaaatcgcccttcagtgtaactgagtccagttcacaccttctgtcaagaaaaatcgcccttcagtgtaactgagtccagttcacaccttctgtcaagttcccggttatttctaaggctaagaaggaaaaccagcttggaattcattgacattaaaaaaaatttttttcccccatgagaaatgaaaagagaatttctgatgtaaaactaactcgctgctatttttatatgtgtcattggtgaagtataagaatacaaatggtaactactcccttggctcgatatgaattttcatgcaaacactggagatgaggccattgtaaccaacgcagaagaaaatataataaagagatttcatttcatatgaagtttcaaactcctttcttttctattgaaagtgtgttttgttttgttttgtttttaaacaacattcaattagaggcattttttcaacattaatttttaaggtcaatgtatgtcaacaggcagaccattaacctccacatggtagccgttcatcacatagagctgtaggcatcaagtatgttctatttaactttgaaaactgtgtagcatgtgaatgtcatgacaactggggctcagagagatgtggcccaggttaccctgagttccagcactaaccgctgtcataggcacttggcttcctgttcctgctttctgcatgctggggatggaacccagggcccaggcatgcttaggcaagtgttctaccatcgccctacccccaccccatgcctgctcccagcctcagatagacctggggtccctcctgtccttaaatggacctgggattcttgccgtcctcctcaaggcacatcttccatctgtcccctcatctcctgtccctctacagcgtggcccgaatatcctgtatattctttatggtaaaagttctcattaggctaacaattttcaattttgaaccaatttataggctgattatcaaaggatcctagtctatgatcatactatagtttatttcatgcttagccattttcaatgtgtttttaatattcctgtgttcatgattagatgtaggaagaaaatatgttacagtctcagtatttctattttaacttttcatgttttaaggtataagcccacaagtaagataatcatgttataatttttgaggtcaggtctgttaatatcaaatagattatcagtctattattctctctctccttccctccctctctctctctctccctccttccctctcccctccctccctccccttctctctctccctccctccccttctctctctccttccctccctctctctctctctccctccctctctccctcctccctccccttccttctttccctccctcccttcctttnnnnnnnnnnnnnnnnnnnnnnnnnnnnnnnnnnnnnnnnnnnnnnnnnnnnnnnnnnnnnnnnnnnnnnnnnnnnnnnnnnnnnnnnnnnnnnnnnnnnnnnnnnnnnnnnnnnnnnnnnnnnnnnnnnnnnnnnnnnnnnnnnnnnnnnnnnnnnnnnnnnnnnnnnnnnnnnnnnnnnnnnnnnnnnnnnnnnnnnnnnnnnnnnnnnnnnnnnnnnnnnnnnnnnnnnnnnnnnnnnnnnnnnnnnnnnnnnnnnnnnnnnnnnnnnnnnnnnnnnnnnnnnnnnnnnnnnnnnnnnnnnnnnnnnnnnnnnnnnnnnnnnnnnnnnnnnnnnnnnnnnnnnnnnnnnnnnnnnnnnnnnnnnnnnnnnnnnnnnnnnnnnnnnnnnnnnnnnnnnnnnnnnnnnnnnnnnnnnnnnnnnnnnnnnnnnnnnnnnnnnnnnnnnnnnnnnnnnnnnnnnnnnnnnnnnnnnnnnnntctccctctccccctctctctccctcttccccctctctctttctcccctttcttccccctctttttctttttctgttttcttttttccggtttgcacacattgtaaacttagactgtttattcttctaatagtgaaaaacctgatgtgttatcccaggagttggggattgctgaagaccagatgagagtgaagtgggaaagcctacaccaagagtttagtgccaagcagaagctactacagaatattctggaacaggagcaagaacaagtggtatcaaacattttcttcatttctttgtttccctttgggcttgtgaaacagggtctcctgctccacatgttgccctagagtttgcaatgtagctgagggctgcctgctcctaggacggctgcctcctaggcactgggcatgcgagcatgaacccctttgctctgcctgtttagctttaatatattaactgatagaggagatacacagcttatgctatgggagtagaactgtataataatcagtataatgaatgaattatataattctgagataagtataaggcaagttattcattttgtattttgcttcacaaggcatgcctcacatttcccacaatgtctttgtatgtgaaaatttatctgatttctatatttttcccaaagatgattaatatctgattttttattagcatgaaccacaaaagtccaatttaattttcaactttgaaaattatggtttcaaacctagagtatacatatcaaaaaggatttccacaaatctgaaacttaactgctgggttgcccccttcccactgttacttccagtcttgaatgctttcagaaggttttaatgagaaacatattggagccttagagggtcttgagaacaaaagaagctgatggtcaggtagggcagttagctggcccatctgtaaggccggttcctgggatggatatcgtgtgatattgggctctgttccatcatgcacacaatatccaaggcaacagaaagttccagaaaagtaatagttattggttcagtctttgcagaggctggaaaccaagggggaagtcagaggaactggagagtttaaagggggtaatgagcaagccaggaacctaggtatgcctgatgcctacagtggctgtggctcagaggggcacggggcagagtcccagggctcagcaatgagttagcaatgtctgccttgctcactggaggacagcaagttttccccagtggggtaagtcctagagtctttactgttggtcctgaaaaatctgctgttgtcatcatttggagctagctgttcaggaaagggtgataattagacagagatggacaggaactgtcaaggcaggcaacatgacacgaatcagtgaacagagatggtctgtggtgacagactgtcgcatttcttctgacagagtcgttttccaaaacctcctagcaggcttcactttctgctctttgcactcctctggccaacgagtctgcaggaattgccatcagcgctggctgatagcacgccattcttgggtttttttgtttttttgttttttttttttttgtgccagaatcattttcattctgacactgatattcaatgtcttttgcacagacctccaatctttgtctgaacccttccttacacccctagtcaaatgtttctcacacctggagctagacttcctgaggtagatcacctcaggatgtcggacttccagcttaccttcatgccacagtatttttccattctttgagatgtaagcacctaaaaagattcctgccccttagaagcctaagcccactattccactaattgtccactcaggccatagcacccgcatgactagcactgaagacatacctcattgtggagaactgcatttcctgtaagtgttggtatccagcattttccatctgtcctaccatcatgcttctgtgacacctgggtgttgtccaagtttgggttcatattcctgaccttcatcttacaagtagaaagtttcagctgtccattttattttacagcctgttttgcatcaggaaacttccttttgggaaccactggttttcctctggcatgaagagtgaacaggaagtagataagaggtccagagcccctgtcaaggggagagaagcctgttttacacttagattttagcatgtctagcaacacttagatgtgagaggccttatgttcactttgtagacaatgttggcttaggaaagggagatggcagtctcaggatctaatgatcttgaagaagcaatgctggaactggggtatagatatgtgtgtttcaaagtctctccttttcacaactgctgactggaaactttatacatcagatatacttactactctcaagtgaaaaagctaacacaatcgagcggggggcgggggggcgctgaaattaaatagctcaaggggtcagtggattctgtctctccaatgggatttttcttcatctctttacttgtagagtatttaagttaatgcccccttggcagaagcatttttatggatttggggttaaatactgttctaccttctgcaaatctgtaacccaacccagaaactatttcacactttcttgaggaaataagtagctatgggaggtcccactccacaaacaggaatccaaaagggagcaagttaaaataatggtgaaaacccactataacagataaatcatttaagactgcagcaatgaagagacaaagatatgccgagtaagagatgttcaaactgcaggatggagtggcctgaaattctcacgagatgatggatagtcagactcagtcaatcagtcaatcagtcaatcaatcaatcaatcaaacgatcaaatgagagtgaagtatttttgaaaagccatagaactttcattgggggacatctccaacgtatttgaatgctggtactgcagatggtccttgtgggggaggattctaaaagaagttagaagagaagaggtgaatactaaaagaaaggagactggtgtccggcagagagttaggaggacttatttctctaaagacagagatacagcaaggaagaaattttcagggtagctgagacaaaagttcagatatttctaccattatttttttccctactccatcattaaaaatcatggttgttactagatctggccactgtacacagtgatgtactgtatggtagaattcccatttctctggacaaggcttccaataacctactttgtgtgtacctccaacttggaaaactatgcatggctcacctactcttaagtaagccacccctgtttgcccacagctttacagtagtccgaacagactcctgtcaggagtacttccattcagaggggaagcacagactcaggataagacttcagtgacgtccttgctggatgggctgagccaggccttcggggaggcgtcatcacaggtatgcctgggccatcattgtacttgtcttggtcttgtctttctgggacttgttcatctgaactttgcaaagttgtttcatctttgcccatgactgttgaggcctagcactagtgatgagtcctggagcttacaggtgctaattcctgaatatccgtttgctccattatttctctatagttcttcaaaatactgaaatgtattaatattattattattatgatgatgatgatgacgactaaaagatgagttgggagtggagaggtggaggcagggtctcttgtagccaaagctgccctcagattcacttctcagctgtggatgagcttaactgcctcatcttcctgtcttcagttcccgagagctggggttccaggtctgtggcattacacctggatggagactgattgtcttctgcgtgttgcgtgtctctctgtgttccccagagtggagggacagacagacagagcattcacttggagcagaagctatatgacggagtctcagccacttccacctggttgaatgacgtcgaggagcgcttatttgtagccacggcacctttgccagaagaaacagaagcttgtctcttcaaccaggaggtaaggttggcaatttctgtccatgcatgaaatctcaaagcaattacaattagtaacgagtaattatatttacaaatatggaataccaagaacaagacagctctaataaaatgctatggtgtgtttccaagaaaaatagtgtgggacagacttttttaaacataaaagctctcaaagacatgtatgatatgcatttttataactttttaatgtgagttcaagaggaggagaaatggagaactctgggttattgtacatttcaaatcctccctgtatgaaacacaaactataagaactgaattcctaaccagcatttattttttttaatttaatttttagcaatgcatatttttattatataatgatataaagtctctgagaaaaatctctgctagaacaacttacctgtgacctatagaagttctcgaaggagactcggcttgtctaagtgtagttgttagtaagtgaaaggtttcctggatttcccaggggatgataacttgatttacagaagtccaaacaatgaggtgaagcttggctttcatcaaccctaggctcttgccaaggacattaaggaaatgtctgaagaaatggataagaacaagaacttgttttcccaagcattcccagaggacagtgacaaccgggatgtcattgaagatactctgggttgtcttttgggcagattgtccctgctggattcagtagtggatcagcggtgtcatcagatgaaggaaagactccagcaaatcctccgtttccaggtaattggaaggtcacaaagggtttgggccattttcaaggaacagcgataatgatcagccatgagtatcttacaagcattcattatgtgctgcatatttgcagcgaggtatatgagggcatgtgtgagtgcacgtgcatgtgtgggtgatatgaagtatgcgcatgagtgtgggggtcattcctcaggaatcacctaccctgtgttcattttaacttttatttcatttctttatctaatatgtgtatatggagatgggaagcatgaatgttgaggtcagaggagactcatctgagtcctttgtctccttctacaatgggagtcctggggaagatgctcattacacttgggtagaaagtgtctctccccactgagccattgttctggcccatccatattgttttgaagcataaaggacctcactgttcttaaggtaggctggcagcctagtgagccccagtgttctaagctcttcctctccagggctggagattacaagggtgtgttactgtaactagctctttacatgggtgctgagggtcaaattcatgaagcatgttagtgtctgagctatctctcagatcttataaacacattagttgggtttttttgttgttttgttttgttttgttttgttttgttttaatggataacaaagagctagaacattgcagaacaccagctggcttgaactaaagatttagaaagccaagtttcatgcttttagaatttggaaggatgagaaaaccacttagtcaaaccaagagttgaataaaagtttaaattcaaccaataaaagctaaattatcatttattgtaatttccaattggtaataatagagtttatttcttgttaccaaagagcatgcaggagatactgtaatatcaaaaacaccccaaaactcactactgaaaagcttttgaaatggcgatggtctaatttcttctcgctctctcaggcttacactggaagccgttacactgctttccaatccgaactcttcagatttattactttttgctgccacattagaatcccagggccagatatgtaattctatgcttagggaaccttttctgtcttgaatcactggaaaaaacggaaaagtcactgctaaacctttagtattgatggttttcatgctcaatcaaaagggcccttttcagaatacttacgacaatggaagctatttttcagcaaacctggaagaatttgatgtaatttttgatttgtaaaaagttactataaacttcaaatgttacattcaccaagaaacatgaaaatttctagaaagtcatataaagggacagatcattaccgctttcaaataatctatagtcttaaaaatataaatgaaggatggaaagatggttcagtggttaaatgtgcttgctgctaagcctgaagacctgaatttaatcccctgatcctatttgctggaaggacagaactgactcccacatgttatcctcttacctgacacatgtgcagtggcacacatacatgaaataaataacattgtatatgtatatagacatatgaacatatttcctatgaatcatttttaaatctctataatatccctactggtatatgttgttcagacagagcaaagattaagactaaggtccctgaagccaacaagtttactttgttggctttattggctgccctcggttttaaaaccaatcctgcggactgggctttgactcactaagtatcccaggttctctgcctcaacagccatgtattgcaaattccagctttgttgattgctgctgtataatcttagtagccttatgaccttgagcctctgtgtcctcaactacctgtccacagccactgcctcacaatactgtaaggcttcaataagttgaactctttgagatactctcagtagatcctaatacataacaagtactcaacaaattttgtaatcatcatattttgctattgagtagtcttaagaaagacagcggatctaaaaatcagtggaaagtttacatcgcttctccaggtttatgcagcactcaagaggagggggggatttaagagagcacttgtgcattgcatggtatggaagcatgagcaggagaccttagactagcagactcactcaagatgcattctgaatagaaagacaactgcttggatgtgggaatggggaaaaggatgcctgctaaggagcccagggatgctggcttgcatatctggaggcctcaacagacagaggaggcagatagacagcagtgccagtggccagtggagtagactatactctggaagtgctttaatggagacatgggtagcattaagatatgcacgtgaagactcacagtgggtatcggagtgtgtcactctatggcactgaggagtggccttggtgggattcacacctgtgcttgttagaatgtatggtatagaacaaggagagagaaatccacttagaatcagaaaaacagggttgatttttctgggtgttatattttgtacacatgtatactgactgtgcctggaaagtcaccaggctaattagagtatgaaaaaataattttcattactctaaaatgtattgtctatgaagaaagttgccaaattattacagcattttagtctgtaagccacacaagcggcttgcttaggcgtgcaatcgtgagtccctgagaggtgtatttacttctgtctcgttccttctacccagttaatgcttatgacagctttgagtttcataatcttaaccagtgacagtaaaatgctaactaagtatgactttttcagaatttagtttatcgtaggggaccatggaaattacacataatcacgaaattatcttaaaatcatgttctctgtttttctttggccaagaagtttttgctggtttgttagtggccagctcatgaacaaaacttgacagttcaaatgttgatgctccaatttaattgaaggaaagaaccctaatgataacacaataaaagatcaattcatatttacgaaccattttcttgtagagagcatctgccctgctgcctggtactaaatagttgttggcacgctacccctttgttctccatgtcatctatgagaactacccttttccagactgttaacattctccgaaaatttcctccccaaccaagactgcaagataaatagatgacctgtatgtgtcaagtattatgtgtgtcacagtcaaattagctgtcactattatgttccttacgcatagattgaaccccaaatacatttcagtattttgaaaagttctgaatattttaaatgacttttaaatgtgagaagctaagggattctttaataacctcaagtcagcattaccagttttaaggcttcaaaatgtctatgcatttgtctttcaaatgactcataccctccctttactctctgaccgaaagaaataaattgtaatatctgttattttattatatacttcttaattattgctgtatcacaagtatagtaataataatttgttgaatccttctgatttattcctttttggttattattcttaagaaaacaataagcataatgccattgcccccacccagcaactcttattaatttttccacaaaccttgttattgttctctcgactagtctttcccagtagtggcttctagaaataacaaccatgtcttcttatatgttaagtaggacacaggggaaacaccgtactgaaatggcagagaggttataaaggaaaggcacacacttcatttctaacccatgttcggttacttctacacaatgatgctttggatgaagtgaactgacccagccttgagtgcatgtagacaccgatggacattcagaagtaaatagaatcctcccccccccttcaagggcaatgattaagacttcttgcttttgactctattcaaatgagtgggaaacatttttcattttagcttattaaaaaagtctaagagcccgtgacctctcctcgaatgctgttgagtaatagggacatatttggagcccatgaaaaactcattatttctccagtgctctccgaatgattttctctttcgctggctgctgagcttgcagctcagcttgagtttgggttagtggcaactgttgcttttcacacattcagcactaggctctcatttcagcccccttcctttttcctccctccctcccttcacccatccttccctcccttccttctctatcatttctagtgatcaagctctggtacttttgcatgctaaaaaaataatatagcactcagcataccctcaatttttttttgctcaatttatacattattttgttttttaaccttgcattatgatgcctgtatacattcattttaaaggatatatttacctttattttatggtgtgaatgttttatctgcatatatgtgtgtgtaacattagtaccctaagaagtgggaagtgggccctgggttccctggaactggtgttagagacagttgctagaggctgtgtggctactaggaaccaaacttgggatctctgcaagagcaggaagtactcttaatttctgagtcatatctccagcctctgcatacattttttttgtcccccaaattaaacaaattttacttaagaataaatcaacatcttcgttccttttattgaaaacagattacttttcctcacataatagctcctgattatccttgcccttcccctcctcccggctcctcctcgccgccccttccaccctctttctgtctcattagaaaacaaacaggttgctgtggggttatgatatgatgctatggcatagtacaaagcataaaacaaaagttggcacatcagaactggacaaaagaaacagcagggaaaaaaccaagagaagacacagaaaagagacctgcttgttttgcacactcaggaatcctataaaaacattaaactggaagtcataatgtatacacaaagccctgtagagtaagaagaaaaagaaaaaaatacaccatatgtatatgataattaaaaaaaaaaggaaaacccctgatacaacattatgagacaaagaacctccaaagatactgttgagttcacttcctgttggccatctacagctgggcatgtagcttccccttaagagtagtttgttttcccagtgtgattccctgggatgaaacttttcatattcttgcttggggtatgtgctgtgttggtctacggccagttcctcactgagaggagaatgccgtgagttaaatttcaacctgtgatgaccggtcagcccctcatccctgtttgctgctcatgagatatagatccaggcctggtggcaaacgcctttggtctcagttctctcaagttggaggtagaaggattacaggataagggtagtccagctgacttagcaagactcttgtctaccaagaaaattgaaacagagagttgatgtgatacctcagtgagaaagcacatccctagcatgtaagaggctctgggctcaagctgagtatcacaaaacaagagaaacaacaaaaataaaaacatgaaaggaagaaaggaaggaaggagagagagagagagagagagagagagagagagaaagaaaggaaggaaggaaggaaaagacactagcttatatttctgggaatgtatcagcatttttatagttaaattattattattttcatacacggtgccctttgaaatgagtgtaagaatttgggtcgctatctcttctttatagacgtctcactcactataaatatgtactggatagttagaggaatgatgtttatgcataaaagacttagctggtacctttttgaaatgttattttctgtctctttggtgtatgtagccttgattttcatactttttaaaaagccaaaaaatacatgctggagagatggctcagcagttaagagcacatgctgttcttccagaggactggggttggttcccaacacccatgctaagttgctcattgctacctgttgctccagttccagggtatctgatgccctcttccagcctccctgggaaccttctttcacatgctcatataatatacataaataaaaacgaaatcttaaaagtcttaaaattaaaaataaattttattttaaaagttgttaaaataatgtatttggaaggacatgcactggttatatacaacactatatcatgatatggttttatataaagggtgtgagcctctctggaattagatgtctttagagggtcctggaagaaattcccactgtgttgtacaacactgaattcctgggacatgtaaacaaatgcctacttaccccagtgggaagtaaaggatagagtaatttaaggatgccaccaaggtccaatttggtgaatagtgagttttattgacattcttttagaaatatggagcagatgtattaccaaagcccaacccatcagttcttattgcttaaacatgcttggggtaaagaaggggcctagtgcacctgctcagtttcagggacttccttccagttgttttcttcttgtcttaatgtgtttccttataaggaggaatctttcacctcctcttagaaattgttactgtttcaccatcctcttaacatctttattaaccagtttccctctgaggttataacgctttaatcttggaggaaactgctacataatatccagaggcagaggtgtatctgtgtatcatctccttgaatctgtgtgatgttgtaacccttctactcccacatttcacatgttgtctttccatggctttcttccccagaatgacctgaaggtgttgtttacatcgttagctgacagcaaatatatcattctgcagaagctggcaaatgtgtttgaacagcccattgtggaacagatgcaggtatgtacaggcatgttctagaaccgcagatacgtagatcgctgctttactgtgagatgccaattttttttgactgatgaatgacatgctatggcatttttattcaatgcatattttaatttctacatggggtttggatagagtgcccagtgatactgacttggtcccttctatacatatttatggaacgtgaggtcagaagtgacatcagtggtagctgctgctctggaggaatttgctactccaaaatgacatcagaaatgacctccatggtgtaggaaagaaagaggacattctcagacatgggttcccaatttcaccctatttacagggggctcttctggtattcaccactgaccatgcagaccagctggcctgtgagcttctgaggtgtcctcttgtgcctcccacatcactgtgagagtactctgaatatagaagcctgctggcttgtctggtttatgtggtccctagggatttgaattagggttaccagtagatctctttacccactgagccacctcctcagtccctgaaaatgttcttatttaagttcttcctactttttgtttggctctttgtagaactccaggtcagaaataagtttctcttagtttgtagatgcttgtttccattgctgacttgagaaatccaaaactccttcggattcccaaaggcccctaggggtttggagtatcacaaacatcttggagggcctatttttatctcctgtactgagaactcaataggctcttctggttggatttctagctatcttttcattttgaaaaaaaaatttcaataatttatttaattcttttcatttcttcctttcatctgcttttccttgtgaaactcccttcagggagatacttcacaccttgtccactactctcatttttgaaagagatctttatctttctgtctcttttggtaataccctgtccttttctttaaacaaatacattcttttctgtaatataactggatgtattcacagtttggtcgttggagagtttttttttgtctttgtttttgtttttgacataatctgcttccctctggtcccttttttgtttgctagaatcatctatgttggtcatgttgaatattcttgacttcatagtcatgttttgttatctgttttatatctgggttgggattaaatagttgaaataggaacctgaagtaaggatgaaactgacaattttgaggagataactggttcattggcccatttgttggacaagctctctgttcaagttttaagctccctcaattgttcttatgaaccccaactttctcagcagtagaggagtgaccacagcccttcctgaggcagagtagacttggttgacttgtggacaaagctttgtaatttctacaccccatttctttctttcctttctctcttccttttttcctctcttgttgtttcctcttttattgctcttccctcctctcccttctaccctgcatctctccctcatcccccacatcctccctctctctttttgttcttcctctccccaagggtattgctagtatgtgagctgcctccaggattataggcatggacgacctactccaacttctcccttttcaatccaacactgaagcctactgccatatctgccatccctcagtctagaaagcccccttcctttttcagataataaataaactttgagcctttcgtctgcaaagaaaagggcaatgtggcatgaagcagggttgggattttatgctctcggcagtttttcactagctttctgtctctgtcttccaacttactgaaactcccaatgctctaaacttggtagtgcagttgttctattaggttagaattcagcttactcagcaccagtaaaatttcatatatttgtctgaattctaactttgagaatttgttggtcttgttgtcttccctgtttccttgccccagcaccaaaaaacaagcaaaccaaatatttgctattgtttcagagagatttcgggacaggaaaagggggacatgtgtttcatctgccatctggagtccagactcctctcattgtcaagggcgactgggttgtagttcttccagaaacccacttagaccagggtctgttggtcggatcctccttcctccattctcttgtcaaagatgagttgcatcatgaattttagtacctaattatattgagatttggtttattttctactggcatccttacaagactgtcagttccttgaagtttagagcaaggtctcctcttcccagagacctcaccacaaggctcagccagtttaatccttgctaattgacttttccactttagagaaaggaacaaccattgtttttagacttatttattattatacataagtacactgtacctgtcttcagatgtagcagaagagggcatcaggcctcattacaggtggctatgagccaccatgtagttgttggcatttgaactcaggaccttcagaagaacagtcagtgctcttacccgctgagccacctcaccagcccagaacaaccattccttgaccaggctcccctcacactttggtgttgccacactggtgcagtgtccagtgaagttccattgcatttcaggaagctccatggccccctagacatctcgggaacatactttactcacagtctgctacagtttactacaggctgcttctaatgtagggtgatttatctacaaatccccttgtttaaggaagccattcctctcacagctctctaccctagctctgccctacctccttgcctaataaagctaacgtgcaatataatagaggaccttctcttttttccagtagtacatgtcgatgttttgtgtgtgtgtgtgtgtgtttagattcttcttatgtatttaaaataattcttgaaaatagaagtacaaacccaaaaagtccaaaagcttctttggagcagaattgttcttcagagtctgaacaatatgttgtgaatcttacacaggccatccaacaggctgaagagggactcagggacctcgagggtggaatctctgagttgaaacggtgggctgacaagttgcaagtggaacagtctgctgtgcaggaactctccaagctccaggtaccatctccagcggcagcttggcctctgtggcccagcttgactgaaacatcaagaaaacatttccaccatcctcttggaaatttgttcaaacaaatgtcacctcatttaggtcttgacttttacttagaagcaacaaaaattttctgaactttcaaccatttttcatacaatgaaaaatatagatgcagctagccttcatatttttttctgtccttatggagatatcgaaacaccatgctatagttcaatggtaggatttatttatttacttctgctcttgaaaatattactatccttatgatccctatctagtaaaattaaaggtgaggggattttcatcagatattgtaatatatttctagggatgatttaacagagtaaatactcaaggtaagactttttagaacatgggtttcaaagtgagagtttatcaggcatacatgctggaatgtaatacaaatgttcaattccagaatggcaacaaaacctataaagtttggaaatgtgtgctgacttttccattacttttcagagaggaaagaaagggagagagnnnnnnnnnnnnnnnnnnnnnnnnnnnnnnnnnnnnnnnnnnnnnnnnnnnnnnnnnnnnnnnnnnnnnnnnnnnnnnnnnnnnnnnnnnnnnnnnnnnnnnnnnnnnnnnnnnnnnnnnnnnnnnnnnnctatttagcattaattttgacatcctggcaaaactactacatggggtaaaaggacagaactgaggataccttcccaaacctaaagtttaacacattatagaaagcaagctgtaattttatactctgtgccattgggtatcactgcgcacagctggttagtttttgtctctgggcattgctgcagaacacttggggatggcagtgagtcagacacaaagccccaagtcctcctgagaaaacacaagggctcttacaaacaagaagtcacttttggtacgaccctctcaggcccttggctaacattttgaaatgtcacaggacaaaactcccccgcccgcttgcccttcctttagatcattttcccacagtgcttcagtgtcaggtgtaagagtcaaacgtcatagccataaataagcatttgagttgacttttccagattgaacagttctggctgccccacctcagtacgatgcactaatcagaaccgtatgcctcagtaagttttgtttggtgtctcaccatctcctaaaacgtccttccagattaaatcgttgtttacttcaccacgtttggcagaaccagttgccttgagtctaaaggttttgctcttcaaattaacttccctcattttgcttttttctctctctatgtttaaagggctctctgagatctgatactattttgctgacaggaatgtgagagatactttatattcatttattataagattaagtaaatgttaagattatgctagccataagaatcaggttttctctctctgaaatctctcttcatcttggggacgtttttgttcagcagcctaaccgcatatcacataatggatgattaatagccaaggaagagaagaagtggcctcatgagtcatttctagggaatacttagttttagattgcctggcttcttatttactgtaacttctatgtgtatgggtatttgggttatgtgcatgtctgggcagcatgtgtgtgcctggtaccacagacgtagaagacagcgttagagctcacggtttacttttctccaatggttctttctacattatgttacttccttcctttaccccttctctatagataccccatcattaaatctttgtgaatttagtttttctttagttgttcttctatgatttatgactttttcaagagaagaaacaatcaaacttaaaacaaaacaacaacaaaaaaaagaatatgtaagattgccaagcaagatgaacaaaagagcttgaactaaccaaggatcaaaccccaggaaagccatggtcccgtgcatctgtactacaggatacagagataggtgtccagactgtctcttttcctctttaagatatttcccagagaggctcataagaaaggcaggcagcttgcttccatgcagagactcctttgtggaggggtatgaccttggtgggatgctgggcaggtggtgggctcggtactgcagctttgtgtttgagactggtgttgttgcctttgccttaggacatgtatgacgagctattgatgactgtcagctcccggaggagcagcctccaccagaaccttgctctcaagagtcagtatgataaggctctgcaagatctggtggacctgctggacactggacaggagaagatgacaggggaccaaaagatcattgtatgctccaaagaagaaatccagcagctgcttgggaagcacaaggtgagctgagaccaggaaggcatagctgaaatagcacattctcaggcccttacatagaggggttcggtatttcaaccaaatatgcctgggttttatgcgctatacttgtataattacacttctaagtggtctattgacatttgttcaaatcccctagcatctagagtaaagaaaaatggtaatgggtatttttataacaagtataatcagtaattttactcattagttctccataaatattaacccaactctcaccatatatgaactttaatcaaggaaaaactcaaagcctttccttagtgggactcagattgcttttattctctctctctctctctctctctctctctctctctttttctttttaaaagacaggatctcatgtagctcaagctagcctcatatagctaaaggtaaccttgaacttcgaatcctcctgccttcaccttctgagatctggaattaaaggtacatgcaactaagtttatatggtcctgaggatagaccccaggacttggtgcatgtgagacataaaagctctaccaactgaccctattgttagctacattcttaactcagtttccccctgtgtatttgttagggcctcttgccatcttgccccaggtgctctctctccccgtcactgtcctggcatagactcctcactccacgctgggaatacagggctgcccactctgttttggtgtctgttacttgcgtcattcagacctcctggcccttaagcacattctcctgtagttgctgttggcctccaagattttcctgggcttgaccagaacttttaccacgcaatcaggcttgggaacccagagattgcttcatcagtgtgcttccaaatggagctcaggttcattactccttagtgaataaataaatatatattcaacacacacacactcacacattcctatcataatacattttaagcaatgactatgcaaagcttaccaggctacaaactcagcctcccaggctatgggaattcccagaagaaaaacaaaacagtctcactgagttttaaatgattaacaatctactgttctgtggctctctggtgggctattattgtcaaattgttgggggaaggggactatacttttttgctatttttcacccagagattttctgtctaaagagttgtataatttattaaagccttatcatttggctatgaaaacattgctttaaagttcacagctgttttctctcaaatctgaccatagcaataaaagatcgctctgagttattccagaagggagactaggatcaaggagcaatagaataacagaaaagatgctcagttaggaaaaagttttaagggagtagactccagctgccacttgggctgcacaggggcctctttggtcatggaaatgctgccaaagccagagcgggaggtaagcttgtgttgaaagcatgcttgactgtcagtgcacatttggcttagtaggtctttcccagccatacgatcatttcatcaactgatgattggttaaaataatggttctaaaatggacttgatgtcacaggcttgtgttgtaatcccagctacttgggagattgaagcaggagcaatttcaagttcaagacttacctcagctaaagagaaagttgagcaggagtgaatacatgagttttatttcaaaataaacaacaaaacagcatcataggctgctggtatacctcatgggtagagtggttgcttaatgctcttgggcactgatcttgattcctggcacaacaaaacaattatggtactgttgatgacgatcaacctaccctttactatccagtctatgttttgtgggagacttctacagctttggtggggacaaacttacagtcatataataggaattaaaacctcaactctgattcctgtcagggccacccctgccatcttccttctgatcccagtggaggcctctaagggctccagagtgctctccatgctcagggttccatcaggccttcatcctcagccaggaggcagacctgaaacctagacccctggacacattcactgccagaggagagttggcctacaagaagagttctcaccccagaactcaggaggtggatcagagctccagactgctggacacttgccctggaagaggagagcttgcctacagagagtgctctgaccactggaactcaggagacagttggattctcaggagtgctgacagaggctaaaagaatcaaaggaggatcaagctctaaccagagacagcttgaacattaagaccagagatttccagatggtaaaaggcaaacgtaagaattttactaacagaaaccaagaacactgggcatcattagaacccagtacgcccaccacaacgagtcctgaataccccaacacacccgaaaagcaagattcggatttaaaatcatatctcatgatggtggtagaagatcttaagaagggtattaataacccacttaaagaaatacaggagaacactgctaaacaggtagaagcctttaaagaggaagcacaaaaattcctcaaggaattagaggagaatactgctaaaccagtaaaagctgttaaagaggaaacacaaatatccctcagggaattacaggagaacactgctaaacagatagaagtccttaaggaactacaggcaaacactgctaaacaggtagaagaaacacaaaaagcccttaaagaattacaggaaaacacaaccaaacatgcaatggaattgaaaaaaaaaatccaagatctaaaaatggaagtagaaacgatgaagaaaacccaaagggagacaactctggagatagaaaccctaggaaagaaatctggaaccatagatgtgagcatcagcaacagaatacaagatatggaagagagaagtgcagaagattccatggggaacatgaacacaacaatcaaagaaaatgcaaaatgcaaaaagatcctaactcaaaacatccagcaaatgcgggacacaattagaagaccaaacctacagataataggagtagatgagaatgaagattttcaacttaaaagggccagcaaatatcttcaacaaaattatagaagaaaacttcccatacctaaagaaagagatgcccatgaacatacaagaagcctagagaactccaaatagactggaccagaaaagaaattcctcctgacacctaataatcagaacaacaaatgcactaaataaacagaatattaaaaacagtgagggaaaaaggtcaagtaacatataaaggcaggcctattagaattactccagacttctcaccagagactatgaaagccagaagatcctggacagttgttatacagacactaagagaacccaaatgccagcccaggctactatacccagcaaaactctcaattaccatagatggagaaaccaaagtattccatgataaaaccaaattcatacaatatctttccatgaatccagcccttcaatggataataaagggaaaacaccaacacaaggacggaaactacaccttagaaagagcaagaaagtaatcttttaacaaacctaaaagaagacagccacaagaacagattcccaactttaatatcaaaaatgacagggaacaccaattacttttctttgatttctcttaacatcaatggacccaattccccaataaaaagacatagactaacaaactggctacacaaacaggacccaacattatgctgcttacaggaaacccccctcagggataaacacagacactacctcagagtgaaagaatggaaaacaattttccaagcaaatggtccaaagaaacaagctcaagtacccattctaatatcaaataaaattgacttccaacccaaagttatcaaaaaagacaaggaggggcacttcatactcatcaaaggtaaaatcttctaagaggaactctcaattctaaatgtctatgctccaaatgcaagggcagttacattcatttaaaaaaactttagtaaagctcaaagcacacattgcacctcacacaataatagtgggaaacttcaacacaccactctcaccaatggacagatcctggaataaaaaactgaacagagacaaatggacactaacagaagctatgaaacaaatggatttaactgatgtctatagaacattttatcctcaaacaaaaggatataccttcttctcagcacatcatggtaccttcttcaaaattgaccatataattggtcacaaaacaggcctcaacagatacaaaaatattgaaattatcccatgcatcctatcagatcatcacagactaaggctgatcttcaaaaataacataaataatagaaagccaacattgacgtggaaactgaacaacactctactcaatgataacttggtcaaggaagaaagaaagaaagaaattaacaactttttagtttaatgaaaatgaggccacaacatacccaaacttatgggacacaatgtaggcagtgctaagaggaaaactcatagccctgagtgcctccaaaaaggaactagagagagcatacactagtagcctgacagtgcacctagaagctctagaatgaaaggaagcaaattcacccaagaggagtagaaagcaggaaataatcaaactcagggctgaaatcaaccaagtggaaacaaaaagaactattcaaccaaagcaggagctggttctttgagaaaatcaacaagatagataaacccttacccagactaactagagggcacaggaacagtatcctaattaacaaaatcagaaatgaaaaagaagacataacaacagatcctgaggaaatctaaaacctcatcagatccttctaaaaaggcaatactcaacaaaactgggaaacctggatgaaatggacaacttgctagacagataccaggtaccaaagttaaatcgggatcagattaatgatcttaacagtcccatctcccctatagaaatagaagcagtcattaatagtctcccaaccaaaaaagccgaggaccagatggatttagtgcagagttctttctagcagactttcaaagaagacctaattccaactcttctcaaactattccacaaaatagaaccagaaggtactgtacccaattcattctatgaagccacaattactctgatacctaaaccatacaaagatccaacaaagatagagaacttcagaccaatttcccttatgaatatcaatgcaaaaatactcaataaaatcctcacaaactgaatccaagaacacatcaaaacaatcatccaccatgaccaagtaggcttcatcccagggatgcagggatggtttaatatatggaaatccatcaatgtaatccactatataaacaaactcaaagacaaaaatcacatgatcatctcgttagatgtagagaaagcatttgacataatccaacaccccttcatgattaaaaaatcatggaaagatcaggaattcaaggcccttacctaaacataataaaagcaatatacggcaaaccagtagccaacatcaaagtaaatggacagaagctggaagcaatcccactaaaatcagggactagacaaggctgcccactttctccctacctatttgatatagtacttgaagtcctagccagagcaactcgacaacaaaaggagatcaaggggatacaaattggaaaagaagaaatcaaaataggactatttgcagatgatagtatatataagtgaccctaaaaattccaccagagaactcctaaacctgataaacagcttcagcacagtagctgtacataaaattaactcaaacaaatcagtggcctttctctacacaaagggtaaacaggatgagaaagaaattagggaaacaacacccttcacaatagtcacaaataatagaaaataccttggtgagactctaactaaggaagtgaaaaatctgtatgacaagaacttcaagtctccaaagaaagaaattgaagaaaatatcagaagttggaaagatcccccatgctcatggattggcagaattaatatagtaaaaatggctatcctactgaaagcaatctacaggttcaatgcaatccccatcaaaatcccaactcaattcttcactaagttagaaagggaaatttgcaaattcatctagaataacaaaaaagctaggatagcaaaaactattctcaacaataaaagcatctcgggggtaccaccatgcctgacctcaagctgtactacagagcaattgtgattaaaaaaaaacaaaacaaaacaactgcatggtacttaaacagtgacagacaggtagatcaatggaatagaattgaagacagagtaatgaacccacacacctatggtcacttgatctttgacaaaggagctaaaaccatccagtgggaaaaaaaaccagctttttcaacaaatggtgctgggacaactggcagttagcatgtagaagaatgagaattgatccattcttatctccttgtacaatgctcaaatttaagtggaccaaagaagaactgcacataaaaccagagacactgaaatttatagaggagaaagtgggggaaacccctcagagatatgggcacagggggaaaattttttttaacagaacagcaatatcctgtgctgtaagatcaagggtcaacaaacgggacctcacaaaattgcaaagcttctgtagggcaaaagatactgtcaataagacaaaaaggccaccagcagattggaaaagaatttttaccaatcctaaatctgataggggactaatatacgatatatacaaagagctcaagaagttgaactccagaaattcaaataatcccattataaaatggggtacaaagctaaacaaagaattctcaactgaggaataccaaaggtctatgaagcacttgaaaaaatgttcagcatcctcagtcatcagggaaatgcaaattaaaacaaccctgagattccacctcacaccagtcagaatggctggatggacctggagggcatcatcctgagtgaggtaacccaatcacaaaagaactcacatgatatgtactcactgataagtggatattagcccagaaactaaaatacccaagacacaagatacaatttgcaaaacacatgaaactccagaagaacgaagactaaaatgtggacactttgccccttcttagaattgagaacaaaacacccatggaaggagttatagagacaaagtttggagctgagatgaaaagatggaccatctagagactgccatacctggggatctatcccataatcagcctccaaaccctgacaccattgcatacactagcaagattttcctgaaaggacccagatatagctatctcttgtgaggctatgccggggcctagcaaacagagaagtggatgttcccagtcagctattggatggatcacagggcccccaatataggagctagagaaagtacccaagagctgaaggggtctgcaaccctataggtagaacaacaatatgaactaaccagtacccccagagctcgtgtctgtagctgcatatgtatcagaagatggcctagttggccatcattgggaagagaggccccttggtattgcaaattttatatgccccaatcaggggaatgccatggccaagaagtgggagtgagtgggtcggggagcggtggtggtgggggagggcataggggacttttgggatagcatttgaaatgtaaatgaagtaaatatctaaattttgaaaaatgtggggaataaaaaacctcaactctgccctacttacctgggtgaccttgtgctagctacatagactgcatgactcaatgctatcactttaaaatgacagatagataaaagtatgtcatagaccttcagaattgccataaggatgacatgagttgggtaaagcatttataataataataaaagctcaatttcagctgtttttaccaatttctagtccttcagttccactcatggtcctgggcttaagaactgggttagaatgaggcttatacccatcttctaggatctatttatataaaaggtagtatgtgaaatgaataagttcatgcagtggttacaattccattgcaaggtaataaaatataaaggaaaattaaaatcactgttaacaaattattttatgcctatccatgcttagtaatctatcataagcaaggcaaagaaagagcctgtaagttggcaagagtaggtcttaagcccagccgtggtaggagaagaaatcatctcaagaaaaacagagggtatgcagatctgcagataaggatgaggggactagtatatccaagggacatgcgaggccagtagtgtgacagggatggtcagtgtctgtgtctctgatgtcagtgtccctatgcacaggatgccagcagggaactctcctttatcaactagtcacagatgaaagggtttgtcttggagacttgtttctgtagcatagtgatgaaccatctgtacatgagtaagatcaagagggaaggctagttaggagctcagagtctagactttgcaggaatcccctgtaggaagcacacagtgcctgttccgatggcaggcctgttaacatgttggttcagcagggggaggagggagtcggtggaatgatagaccccttatgttaactgtgttccatcagcttccaatgatgaaagggttattatctagagctaatgtccaaatgagctgctgatctccttctgtctgacaaaacttacaggaatacttccagggcctggaatcgcacatgattttgactgaaatactcttcaggaagatcgttggctttgcagctgtgaaggaaactcagttccatacggactgcatggctcaggcctctgctgtgttgaagcaggctcacaagagaggggtggagcttgagtacatcctagaggtgagactgcccaagtcagtgtctttctcactgcaaaatggaactacctgggttccctcatttggggtggtgggtttctgtttatattcagtatgtgatacattgtaatgtgagtcagctggatgaatcccaaccttagagagtatgtgtgaagatgcttacagacttgagcttcaagccaaaaccctaattaggagtatgaaatatggaaattacatatccctggctctatctatgcatttgttcttgtgataagacctgtcactagaatgtagaagccagaggacagcctggggacaaatctttatggtctgagagcaaagacaggaagattcatttgttgtaaaatagccagctagggggctggagagatagctcagcggttaagaggagagtgcttgttgttcttatagagaacatgagtttgggtcttagggaccccatcgggaggctcataactcttctgtgggcacctgcacccatgtgagtgtatacatacatatgcatgtcattaaaaattataaagcaaaacagcagcaacccagaaactctgaagcaaaataatgaaataaaggttcaaaatcgcagctgctatatgcagtgttcttagtcccatttaggaatttgctcttctgtccaagaaattccattcctttgttctgttcacttgcatctgcttatttgttgtaagtgaagaaatcaagtatttatttattcagcatttatgaagttgccaccagattcccaggcaagggaaatataaacatgttcccaggactgtcctcagtgagacagtggtccaatgagggaacaagaacacagacttcagaatgcagaatgacgtctctacagagaagcaaacagcctttgaaataccagatcttatagataatcagaaaaaaaaaaaaaggatgctgtttattaacagggcccagactttggaagagaagttggctcctgggcaaaatgtagcctgttttatataaaggttatttgggtataatagttttattggtttgcttgttaatctccaactgccttcatccaatgggcagacaagaccggttgcaatagatactaaataatctacaaagctgaaaatatttactatgtggtttattgtagaaagagtttgcaagctaatgtcctagattcagagcacaaacagatgaccttgaaaaccaaataagtagtccatagaagctaagtagccacagaaccctgtgaaaattgctggtagatcagttccttcctctggttaataattagctcagttgccctaaactggcccagttcctttaatcttctcattttccttaaaagctttagaagttatgttgtatctcctttcttctttctttttttaaacttaattttgttttagttcttgagaatgttatacacaaatgctatatttatataatttccattcctctgactcctcccctcactcatcttgtactttcaagatctcttacacacacacacacacacacacattgagagagggatggggctgcacacttttgagggccagcattgcgtcacttgctttagatccatcacttgtttcctcaaacacctgctaaagattcctgaagcagattatctcacaagtacagattttacacacatgggggaatgctattctttttgtatgctggttgcttgcttttgtttgcttagcccaggctgtccttgaacttgtgatcttcttgccagcctcctgagtactgtgattccattaattactgttgtgtttgtagatgtggtcccatctggatgagaatcgccaggagctcagcagacagctggaggtgatagaaaacagcatcccaagtgtgggcctggtagaagagagtgaggacagacttgtggaaaggacaaatctctaccaggtctgaactccaagggggcctgggtagcaccattaatgacaacatttcctttagaaacttgccagtaacttaacagaatttaaacaagtttgtgataaacttcattcaattctttacttttctttaaaaattgctgaagttcatggcacacatagactgtgtctgtattgctcatagtatatatgtattttattactgtttgatggtttaatatattacacaataagatttagccccagctttacttgccctctcttatttccttctatctaaggctaaaaccttcttactcacgagggttcctcctactttcatgccttttgtgtgtgtgtgtgtataatccactggatttaattagaagttcttattaaaacaaaaaacaaacgacaactcttggtctgtactctaccactcagcagcaagggtagaggctttctcgacaagcatgttgccatgaggtaggttcttagctctgtgaaatagataataggccaatagataggtgatagaagatagataataaatgataggtacatatgtagttggatgatacatagatgagagagatatagatgctagatacatagatagatatagatactagatagatgatagaggtagagatgatagattatagatagatagatagatagatagatagatagatagatagatagaaaggcaagatagatgatagagagagatatagatgatagattaaaaataggtgataaatgatagataagccatagatgatagatatacatgatagattgagaaagatgataaatagctatacagatagataatagataatggatagcagacactagattatagatagatgacaaatagatagtacatttggagctagcgatctcattttgaaacctttcaaggcattttcaccaaacttataccaaccactttttgtactttagattgatgtcacagttttttttaaagatattttagcttgacagctataaacacatccaaattttctaacaaattaaaaagagaacatctatattttgataaatacattttcaagttttcagaggtgcagagtgaagatagtttacatttggtaacagacaatgccaacattgtagatatcagaggaattacaatgctcagtggcaaaagctgcactaagtcaaacttttaagccagtgtcatcaattgttttagcatttaaaatccagcctcaatgaataccagcccaaactgtaccaagcactggatgatgggaagcgacttctgatgtctgtcagctgttcagagcttgaaagtcagctaaatcagctgggagagcactggctcagtaatacgaacaaagtatccaaggagctgcacagactggagaccatactgaaacactggaccaggtaatgggatgatatttggtctgtgttttgattatttctgcggtgtattactaagacaagtagatactgggcttggaaaagatctccatatttagacagtggcgtagtttagaaaacaaagacaaccagaggattctgatgggattcttgttaaaactggcaaggagaacagggtccaatacagctgagactgttccccctcctccttgcctggttcctgcaaagccttatagacaggggaaaccctgaattagattgccattgctgtgagcgacgtcattgctgtgagtgacagctgggacaaacaacttatcagaaggaaatatttatcttggttcacttttcagaggtttcaggtcaaggtaagcccaaaatattgtgttgggtcctggagcagaatagtgtcatggcaagaacagatgacagaaaagacatcttaccttagagctgccaggaacggtgtgtgtgtgtgtgtgtgtatatatatatatatatatatatatatatatatatatacacacgcacgtgtgcatacacacatgtgcaagtgtgagcacatgtcagagacatggtacccttcaaggatagctctgtatgccctccttctcttgttagtctccactctaattcttctagattttaaacactttcccacatagtacccaccaactggggcctaagccttcatcatacatgcctggggcaatgtttcaccctgaagtcctaaagggaagtgttcaaggaagcaggtatttgagttttattgaacgaagcactcttttttcatccttttatttcaaacacctttattttcaaacatgacccaagatttcccaattcaaggagaaagatattcttacttttcagcttagcaatagggatgctgaagtccagaacagactcaagctataaatattaaaagaaaagaaaaggcaccagccttgtatgcattccttccaaatcttttggggttcttgtttatctgacagcagacagtgcagatggaatagctcattaattgagtcttgaacgtgcttacagatatcaaagtgaagctgcagctctcaaccactggctacagtgcgctaaggacaggctggcattttggactcagcagtctgtgacggttccacaagaactggaaatggtccgggatcatctcagtgctttcctggtaagtccgaggactaaggcgttagggtctcatttcgcttctcaggccagactcatggatctgtataggaaatcagctaggaacaaacatagaaaagaagctaaattgacacagacggctgagttgactttgtatctactactaactaatgcagatgagtaggctccagattgcctttcacataatgggttaacttgagcgtagaggtgtggtacctttgtccccaaagagctccacctgacaaggaccctccgtatgtagaattggtctgtgctctaggttggtctctgtccttaaaggaaacaccccagcattcagtcctaaactgaacattgtgactttttctaaaaggagttctctaaagaagtagatgccaagtctgccctcaagtcgtcagtcacaagcacaggaaatcagctgcttcggttaaaaaaagtggacacagcggccctgcgtgctgagctgtcccgcatggacagccagtggactgacctactgaccggcatccctgttgtacaggagaagctccatcaggtacggagagaaggctggctggtttaatttccagctccttgcaaattagaactatctaggaacttgtctttactctctgctgttgcaatgtgtattaaaacagccatttctacaaatcccacatcagatggcgtttcttcctaaagcagtcagtctctctctccgcccccacctctttctctctgtaggtgttggaaacctgacttgaaattgttgaccctgtttaaactgacatttcacggggcaaacctaggcacctggtaaaaacgtgacgatctataacatctctaaaagtcctgccattttatattcaagaaggacactggattttattcaatataagaacagccatgcatcatttacagaagggatatgttctgataaatagatccttggtccattttgccattgttcaaacatcagcacttaccacaagctgagagatcggcacaggctccttagcttaggataactttatgggacctccattatatttgggacaccacatgggacattgctattcagctcatgactatattctgatgagtaataagtctaactttcctggaactctagaacattttaatcttttgtctctttaatattcatcactgtggatcacatatgatacatgtttttaatacacatgctgtttctcttcgatagctgtagattcgtaggaaagtggaacaatcctgccaaccccatctttctctcctttcagatcccaatagaagtaggtcatatatatttaattttatatatatttggagacagggtctcaaccttgtagcccctggtggtcttgagtttatggtgatgctcttgcctcagcctttaaaagggtctgggttataggcatgaccagccacataccaggaaatttatatttatacatatttagatagtattgctttgtttctgcaaatcactctaatcatgatgagcataattgcttgacatgtgaagtaaaattcagaattctgagtatatcttaaatactgtagaaattggctttcggggatagctgttagagtgccagagagcagagaaaatgagagcttgcctgctgggtagtgttgtcccttttttctgttagcattcttgagtcacaatacagagattttgcaagataattaagaaagtacatctgttgagtgttttgtagttacattttttttcaagcccataaaactatctgtaaagtaagaatatgttctcttgctggtgttttgattaattaggtaatatttatgcaatgtttatggtatgagatgcctagtgagtgaactagtattgtgcttgcctgaggtttcaagtgtcagagatctgataactgtaaaggactattatctctcttggtatgttagtagaactctacacagggttcctccattaacacagtcattctcaatctagatcatgacctctttttgggggtagggagagtcaaacaaccctttcataggggtcgcctcaggccattgaaaaatgcagatgtttccattataatccatatcagtagtaaaattacagttatgaggtagcagaaaaaataggtttctggaagagggtcaccagcacctgaggaactgtattgaagcaccacagcgttaggaaggtggaggaccgctgtgctcagaggagtcgcatctgaaccttaatgttttggacccatcctgtctcctcttcacagctccagatggacaagctgccttcccgccatgccatttctgaggtaatgagttggatctcactcatggaaagtgttatcctgaaggatgaagaggacattagaaatgccatcggttacaaggcgatccacgaataccttcagaaatacaaggtagtggacacttggagacttccattttcatctatttagactttcatttgaaggagctcagaagctcaaactaggacttccaatgtatatcccctgcacagtcggagacattcaaaagcaagcccatgcaaatactaagtacagatgcagtgtgctagttatttttatcttgctgtgataaaataccctgacaacagcatctttggaaagaaagggttaattgccgctagtaattccagtggggatgcagtttgtgagggagggaaaggcctggcaacaggagcacaaggctggcaaacctcattccatctgcatacaggacgcagaaagacagagagcagaaaatggggccagactataaacccctagggcctgcccctggtcacacacttcctccaggccctccagtgagtgtcaactgtttaaggtttggtaacctttccagagaacatccagaactggagaccaactgcctaaacacatggacatatgaaggacattatgcactcaaagtatagcacattaaaaataattattcacccatctctacatatcatacatatgctatttatagtatatatactatttatatttgtttaattttatttttaagatttatttatttattacatatacagtataatgtctgcacgtacacccatgtgtcagaagagaacatcggatcctcttacagagggttgtgagccaccatgtggttgctaggaattgaactcagacccttagaggaaaagccagtgctcttaacctctaagtcatgtctccagccccttgtgtaattttataaacatatatgaatacatacttgagcccctatcatatcaggtcatataaagaaccacggttgtgtcatggcagtgataggagtcacacgtaagttctcaaggctttccaactcctgaaaacacactaagcctttgtatactcggaagcatctcgtctgagtctccggcctctctttcagggtttcaagatagaccttaactgcaagcagctaacggcggactttgtgaaccagtcagtgctccaaatcagcagtcaggacgtggagagcaagcgcagtgacaagacggattttgctgagcagcttggggcaatgaataaaagttggcagctcttgcaaggtcgagttggagagaaggtgagctaggtggcctgtcctaatccgggtaaggaccctgagagcagcccaaggctggcgggaaaccatttgacaagtagtgcagttagatgaagcctgaggcagcttcccacagcccccgaaggtgatctacctccggacatcttaggtcccctttgttctcttctgaagcctccctcctcttacagctgagtctaattttttttttaagatgcctcttcatttctcttccttttactttcttccttacctatatcagccatcagctgatatttgataaacttcattttctgagtgtattccaagaatttcattttcacattttaattttactgtgcagggctttgcaaggccattttcatgcaagtatgcggtgctcttttaggatagtccttcccacatccctctgctgcccaagaactcttacctcataggaaattgtagtgggtaatttttgtgccaatgatttgatttttcaaacaaaaattttgaatgtttgcatccttctgttggtttagatccagatgttggaaggcttgttggagtcatggtcagagtatgaaaacagtgtccagtctctgaaagcctggtttgcaaaccaggagaggaagctgaaagagcagcatctacttggcgatcggaattctgttgagaatgctctgaaggactgtcaggtaacacgtgaggtggaatgcgggagctgcctcgcatcctcaggcctgtgtgcagggctcactggttccaagggttctgagctgagtctggataataactgtacctactgattgatatttgactttgaagtagagtcttactataaagccagtgctgatttaaaacttggagccctccagcctgagtcttcttagtactaagagtacagttatgaactataatatcttgttagggttttgcttgcttgcttgtttgtttgtttgtttgcttgtttgtttggttttgttctcttccaattcaagtcttcatctcctgtttttaaagttttgagattatagaaagaaccagatatacacctaagtaggtaaagatgcttgaatcccttacactgatcatgagagctaatacttatcaatattttagatatatttgtacatttgcccaatttttcttctttaaagatgtcaatatagggagtgaggacatagcctacagggtaaactgcttgctgtgcagatgtgaggatctagttgggtttcacaggacccatgtaaaatcaggttgggtgtgatgggccatctttaatgcccccaggagatggagtcaggggtctccaaagcaagcttcctagctagagtagctgaattatcagtctctggattcaagtgaggggcctgacccagtatataagatagaggaaaatcaagaagaaactggatattaacttccaacccacttacgtgaaaatgaatatatttgtgcaaccacatattcagacacacacacatgcaaccacgtcatacacacacacatgcaaccacgttatacacacacacacacacacacacacacacacacacacacacacaagatgtcagtgaacatcccacacagtatcattttgtccctatatattatcacataatctttgagaaatagtttatgtcaccataatagacctcaaaaattaacaatttcttaatgttattttattctccatccataatcatcatgccctctccatttttatttatatattttttagatagggacacactgtgcaatcccaaactagcctggaacttgttaggtagaccagccaggccttgaactcatagataccagcctgaatttcccttagttatctttaaaatgcttcatttaatttattcactaagattgcagcacctgctagctgcatttttttaaagagttctttagtgtcttaagtgtattttgatgctgtcaactagttaaaccatgccttggcctggccactgccttaaaatgttccttaacttgctattactatggagccttcattcaactcctgttcgacacaggcataggagtttcagaggtgacaatgttccttgctgctgtgtcacagcagaaagctcatgctggctgttcatctcattagtgatgaagatctggggttcaggcaggttgtcagattacaggtgtttgccagtgatagggatatatagtatttcagtatttccttggggattctttggtactcccaggaaatttttttaacagctaagactatactgacaattactttaaaaatcatgccctggatttgatccttagaactctgaaaccagctgtaatcatgcatgcctgtaatctcagaagttcagagtcatccttggttacataatgatatcaaagctagcctgggctacatgagactttcaaaacaataagtaaatactatgaaataaaagctaaatttgctctatgtgaacaaccagttctgtcactcttttggatggagcctacatatatctctgtccagcagcatgaactccagatcttctttcaggctatctcagaagaaggagggccccatgagaagtttccctacaggaaaactccttccttcaaatctcacttttccatctttgcatttcaaacagtaatgatttcttttttaagcagcctgatttctgcttaggacacatgtaatggggaccttatctttaagccctcacaggaaaccttatagtacagaaaaggaaggccacatggtggtccaagaaaggttgcagttttggatttgaacctgtctgaaattattaggtttttgtttgttcattttgcttttaaagaaagattctcatgtagtccaagatggcttccaaattcaatatgtagccaaggctagccttcaactcctgattctcttgtctctacctcccaagttctgggattgcttgagtacacccactgtgcccagtgagaaacttttaagtaccattttgtttgaatgcctcccatcagaagatggatgtgaaaaggactggacaccaaacttgcccatcatctgctctcattggattttgtgtctgcttagaggccaaagatacttccaactgaggccataaatttctaaaatctgagaagtaagccagcatttcaaaaatttgcttttaatgttgaaaagtgatagttttgctgagtccttggagttaaaatatttccattaatttaaaaaggcaacccgtaactgttaatgtcaacaagatgagtgttacccggtctcacggtcagggtcacttcactactgaaaggttgcttattggcattctccttagtgtttgattctgtctccacattcatattatactttcttttgtttgtcctttgttctcttgttttctcttccttcaaaggaagattttaccattatgcggcatgagtgtgtgtgtgtgcctttttgtatgtgtgtgcatgtgtgcctgggtggctggagagatcatcacatcccctagacctggagtcacagttgcttgggagctgcctcccatgagctctttctcatgagagaactgaactccggttctctggaacagcggagtgtactcatgtaatcccagaacttgggaggcaggagacaagaggaccaggaagccatcttgtactacatgagaatctttctttaaaagcaaaatgaacaaaaacctaataatatcagacaggttcaaatccaaaactgcaatgggtgtttgctactttgtttctattcctatatatgccttctttttaatggagagacattgatgcctgaaaaatacacagaagttcagccaaattttatttctcatgggatgtaagtcttaggctcccagagggtcacttcaggcagtgtcagagacaaagcttacattgtgagataaagaactctatgctgatgccaattcatgatttaaaagaaaagccatttctttcagaactaaaagcccagtacggagcccacacacttattttgggacatcatatataaatcacaatagcctaactggcggttctaattggcagttctacaaagcttgataaaatttattgtcatttttgagaaattgtttctttggcccagagcatgaaattatagccagtgtcctcaaatcagtggctggattcaggtttggttttgttttaaaaagcttgactctttttccagtctcttttagaggtgatttattgattgaatgcaacactgaaactgctgtttgtggattaatccaagttgaggataatttactgctgcagaatgttaggattggcctttgcctccattgatcagaaccagaccattcagaaaaattgttatggaaaggaaaggcaaacacacctttactttgcacagaaatatattacaatcctggttcgctcctgcatttcagggttacacatacatatacccaggtgcccaggcgcaggaagctcttatgagatgtgtaagccacacctcatctgtttaccactgtgggtgaatgaagatgtatttaattctaatggttagatttaggatcttataggaaggattactgtgggattcactattctatactaaagtataagtaaatatatatatacacatatacacacacatatatatatatgcacacacacacacacacacatatatatatatatacacatatatatacatatatatatatatatatacatatattatactacacattaagtatgaattgagatgaccacccatggttatttatcccttaggcaacattcagaaatatcttaaactgtagagttaattgtgttttctatactgaataaagaaactggtacctcagtaatcactagattcttttcaaggaatcacaaaaatagtgacaaaagaagaaatgagagaatgacataaaacaacaatcatttccttaagctaacaaataaatgaatttctgattaatgcactacggcaaaattagctccatgataattcatgatggaaaagcagaatctcttggcagcatggcagattaccacgctgaatatgatatatctagttttgacagtttaaagaatatttcatatatatatattaattttattcctttgggacaagcataagatatattattagccctattttataaatgagagagagagagagagagagagagagagagagagagagagagagagagagagagagaggagacgtctgagggctggagtggaggtcagttaaagaaggactttcttagcacgtacaaagccccaagtttgattcccaggacctcatacgttggaatttgtgctgctagtttgtaatcccaaagtttaggacgtagatcaggaaggatcagaaaggtatgttatctgtggctacgtggtgagttcgaggccaatggtatgcttgaaatcttatcgtaaaaaaacagctgggtcatagcagaaataaaaataaagggaataataacaatttcaagagaagcataatacataaacacttgaccaacagctactcaactacaatttttttatccatatttgaatcattgagctggtaaattgttatacaagcattagggcctgggcttggatctccagcatccacataaaaggcgggtgtgatgctgtctagaatcccatcagtggagaggtagagacaggagaatccctgggacttgctgggtaaataaacttttaaaaactgtctgaatgttttgtttgtgtgcatatctgtatgctatgtgtgtgcctggtgctattaatgaaggctagaggaggcatcagacaaggagttacagactgttgtgaaccacaatgtgggtgctgagagttgaacttgagtcttctggaagagcagacagtgttcttaagcgtggagctgtggccccagaccctctatactgtatggtctcaggaggagctctgagcctttggccgacttacttttcttttgtgaacattttattctcgcagttacaaaagtgccgtctaaagaaaatgagaatttcagacacgaagaagcctgtagtctttcagaatcacatagaatcagagcattggaaaaagagaagataatacttattcttttccatctttcccatttgaagaaattgacaattattaaaagtttctcactttctcagagtgacacagccaaagagcagcaaaaccatgtctgactctcaggtgccacctgtcacaggctaggccatgtgatttttggaaaaatgacgtttgggtttaaggatataatcatattgcaattttggatatgtatttcactccttacagctttttgaaaaagatatataatgacatttctttatctgcgggataaccagtttttatatttttcagggtatgctaatttactatggataaaaggacctcttttttttttttttaacatttaagtatagggagaagcatcactgtgcagaccctctcttgagaattgtcatctttttggattagtatggggttttagcacacgaaactataatgactcaatttcagtgcaccctagagttccataatagaacaatttaaaataactatatatattttttaatctttcaggaactggaagatttgattaaagcaaaagaaaaggaggtagagaaaattgagcagaatggcctcgcattgattcagaacaagagggaggaggtctctggcagtgtcatgagcacactgcaagaactcaggcagacctggatcagtttagaccgcacggtaagcctgctcctgacactcaactcccagctctctgaaactgggagtggatgtttgccgaaagtcactgagtaaataattatcaaatctctacatcacctcttggcactgttgagtctgtttgattaatctttcaatttctagtgtttcctgtagtaagcggtattatatatatcactctctttaagtgcacccatcctcatagtgagagcaaactttcgaggtacagttgttctccaatgagcctatccacacacttagcctctcccagagttctaaaccgagacagaaagagatacatgagattagtagagatatctttgtgtgtgaccaaagggcatttcaaactcctctgcctaaagtaaggcacggttcccgccccacaaacctactcagttaccgggaactctgccatgccgcaactgcttgtacaggcaaccttcaaagccacttttccttcctttctttctttctctaatacttacaccaagctcatcagaaaatgttggcagatacactctcagaacagacagaatccagcctcctcctctgcaggcaccctgatttatgcccctttcatttcctgcttggatgattttcatgatctccttagcagtccccatctcagaagagccagtcagaatgaagtcaaatcatggcgttgccatgccgaaaatcccacagttgcttctgctccataaagaatggaataagagctgcgtgctggccaggcttcccactgtcgctctggttctgtttcctgctgctgccctgcaaggtctttttgcttagccacactggtctcactattgagcatagtaggcatgccctgcatgcagaaactttggattgtcggctccctcctcctaacatactataactttcccttgtgtgcctcagtctctgtcagtaaaaggtaaagacatttgataatggactcaagagtgtgttgaatcttccaataggaacggtaagtgctacaatgtgcactatgcctctctatgtaaggtcatgtggatccctgacacattggtgtctgaatgcttacttatccactgtggggcaaacagacagacatgcgtgcacttatgctcacatgctcatatgcacatggctatatacacacacataccacatgctgatgcacaagcatgcatacctacacacatggatccacaacatgtacacatacatacacatacatgtacttacacatacacacattcacatacacatacatgcatttacacacacatacatgcatttacacacacatacatgcatttacacacacacatttacacacatatacacatatatgtacttacacacattcacatatacatatacatgcacttacacacattcacatacacatacatatacatgcacttacacacacacattcacacacgcattgtgtacatagaaaggggactattttggaaaagaatagggccatggagtggggaagtgagtaaggactgtggggagtggatactatcacgggaaagaaatgtctgacagctcctaccatctgtgggctctactccagagcagctttcccctttagccccatattatctttgacatggctttaaatctattttattttatgcatttctataaatcactacgaaggtctgggaacaacttaccatatcgtcatcagttaggcatttctgtcactggaatattgccttgtgaaaaacaatcaacaatgcagagaagaaatgggctatgcaaaactgcccaccaatcacctaccctcatcttccggtctattttatggctctttaggacagccctgcactcactcaaacctgtggcctggacctcacatctgaggcagcactttccttgtcctgtggcccatcagatagtatcccagttgatttcaacatttttccctttatgttgaggaaaaagcatagccaagaaagcaaattaatttccggagctcttcccatgagcaccccaccctctccgtccttatttcatgtacaaaggactgtgtttacattaggagcaactgcagaaatccaaagttatatgcttttaaatgttggagactgaagtacgatttttctctggaatcgacaaatacagagaaggagcatgcgcaggagttgttgtctttggaatctaagccaatgtgctccatagatacctgcatgtccatttttactgatgtgcatccacaatacctaagttatggaaacatcctaggtgtctgtcagcagatgagtgtataaaaaatgtggcatgcatctactaagcttcattcattcctaaagacggatgaatgaaattgtgtcatttgtaagaaatgcgcagcagaaggtaatcatgttaagaaaaactaagccagactcagaaaaagatcgtgcttttcatttgttagagttttgtgtgtggaatctacattccatatatatgcatatatgtgatggaattagaagggagacttactggggaaaggaaaggggctagaggaagctatgtacagggagggctgtggagagtcagtctgatcaaggcatagtatggacttgtacatagatgtcactatgaaacctgatcattgtttggtacaagaatatacactgttaaaattttaaagttagccctttggagctggagagtgactcagcagttcaaacacttgtttttcagaggacccaggtgcagttcccagcacccacattaggcaacgcacaacagcctgtgcttccctgttgtttttagagcctaggactccagtgaaggatttcagagattaacatttttctgttccgccacactaagttatatgtaattatgatgcatgttcttctttccaaaaggttgaacaattaaagatccagctgacctcagcccttggccagtggagcaatcacaaagcagcctgtgacgagatcaacggtcacctcatggaggccagatactccctgtcccgattccgtctgttgacaggttcctccgaagctgtacaagttcaggtcgacaatcttcaggtaaccaaagtatcgcatcttaaacacatctttttttttttttaagatttatttatttattatatgtgtgtgtacactgtagctgtcttcagacactccagaagagggcatcagatttttgttatggatggttgtgagccaccatgtggttgctgggatttgaactcaggacctttggaagagcagtcggtgctcttaaccgctgagtcatctctccagccccaaagtatcacatcttaacattacttccccttgaaggaaacaaaaagataaattagtgagtagaaatatggtcctgaaatattgccttaacattcttagcatttaagtattaaaaacattagtttttcttgcttgattttaacttaatagaacctgcttgtgggtagcgaacactagattatctggtatataaacaaatgatttctagctacctgtatggaaagtgcttacaagtatgttttatgagatgcttggctacccaaatccacttcctgactacacagccttcaccatttatgtgttccctttcttttcttaccccgtttctccaaatatcttctaaggagctaagaaaacagagagaaaaagagcaaggtggtaaacactcaaagcataggttttaatcatatgggtggaatccctttgaccaaggagaccatcaaatcacgccctttccggcgctcactattgggttccacgcgtgtctccacccacactgtgttcacccagaatgcacttgatggagtctgccttaaacccagccccagctcacttcttaggtccctgctgtccaggtctgggttactgtcttcactgtcttgtccatctggacactgtgccacactgactggtcactgttcattcttcttggctaaaatacatagaaaatgggtggagcagggcaggtccgcaagggatggggatcccagccggagcccagcatgggtcttctcacatctagccccactacttctgcttacccatctgcattgacatattgctgagcgcctaggtggattttcataagggaatgcctttcagaggtagatttgggaaaaaggaagactttaatgtgtaaatatttctttaaatcttaagtacttatgcaattactaggaaccattaaaactcaccttgcacatagtaaattcaacaccacatattccttgaatattttgatttgcaagcaattagatattggtacgcagtactgtattttcatagcctacttctcctctgctgaaaactgaagctatcatttaaacaatatttccagggaaacatggagcagaaacacgagacagggtctttccatgcagctcagtgtaacgtagaactcataatgccactgcctcagctactctagtgttgggattatgggtatgtgatacttcagctggcccttggggacatctgtcctctagtctccttgcttgtgctaggtagaggacttcaccagcttgtctaataaatcctctttgctttaagcaacttcagaagtatacagtgcaatattataaatcatagccaactttctgtgcatgatgatcatgacggtgatcttccacctagctgaaactggtctccatgggtccacatctctccttttcataactatctctctcccagtattgtactctatgagttttcacagttgtagacaagtggttctcaacctgtgagtcatgactcctgacagggtcaaacaaccctttcacaagggttgtgtaagaccatcagaaaacacatatttacattaagtttcataattgtagcaaaaattatacttatgaaatagcaatgaaaataattttatggttgggggtcaccacaacataaggaactatattaaagggtctcagcattaggaaggatgagaagtgggctagacaaaagttattaaatatgtgaggtgatggtctgttaattagattaacttaaccatcctacaatataaacagatatgaatgtttttgaacacttattcaattgtcctatggatatgtacagttactttctgtgagtttttttttttttttttaatgtagacctggaaaattctttgcatgaggtagaacttagaagtggtcctcagaaaagctgagattggctgtcttcttcatcagttactgggagaaccactctccgtgctactgacctggcacccttgttttggcaaaaagagccacagtgtggcagacagtgcctggaccgctgctacagcatcttccctaagcaaggacatccttcatgggcttctaaagaagagtccatgtgcagaagggggctcagttgctgtgactctcctctcatgcagtcacacgaacagaactataagaagttatctttttaacagcagtggagtagcacatgcctgtccattttaaacttgctcattagttcctgtttgtcacctgtggttctctttctttgagcagaatcttcatgatgaactagaaaaacaggaaggaggcttacagaaatttggctctatcaccaaccaactattgaaggagtgtcacccacctgtggcagaaaccctctccagtactctgcaagaagtcaatatgaggtatgggaccagctactcttacagcattctcagctgtagatctaaagagtctactctactaatgttttggttgtttttctttttataaaccgaatttaatgaaaaataaccacaaagaagacatttaggaaggatcaggacttccatagtcccaaggatagttttcatccccttggaatatgaatgtgacacattagcctttattatgttaaatagacatgagtcattgttttgctatgcccatgttcacatgaaccatgatgaagacaaataaaatagtaagtgatagcctttggtaagagatatgagtctgccctaagtgctcgctgttgcttgcagatggaataacttactggaagagatcgctgaacagctgcactccagcaaggccctccttcagctctggcagagatacaaggactactcaaagcagtgtgcctctgccatccagagacaagaggaacagaccagtgtactgttgaaggcagccactaacaaggatatcgctgatgatgaagtcaccaagtggattcaggattgcaacgtatgttcagggacttgtttgggacttgcccaacccgctggccttcagtttcattggttttgtagggctagtagagatgcatgtgagctttggggctatctaaatctgtgagacagtttatcccaaattcatcaccccattaactgaagagcctagtcttacagagccctcctgcatgtgtttacaatttgtgagtttctttcccattgttttatttttaaaaatgagttgcctttcccacttttccctagtggggtataaatctatgagggaaatgtaggctatctgtttgtactgaaatagtcactgtaagttgcaaccacatgggggaaaaatcatgcctttaaaaaaaaaatcaactgttaaagttatccacattatttaaaaaaaaaaatcatccacttagatttgttatctgctgcagtgcatcagacaatagctgcattcaggtatttaacagcagagagcagcagcttgctgccacacattttaatagcttttatatgattcccctttcctccatagttgccaataacctacttagggcttttgagaaaggccttctcttattccacccattatggacctcttattgtttgtccttatttgtctttattttaatgatctttgttacaaagatctgcttaaaagctttcccaaatcagtttattaaagtagtcaagttataaaacaacccacataaactgaagattataccttcagtctaaataaaggtttcaagcggcagggttattgtttacaataaagataaccttcgttttggttggcattttttttgtctttataagagcagtcattttcagtgtttcagaaccaagacacatgttgttatctgtgtcaaggttaaaggtgcccttcgttcttctctgaaaggaaactcactgttcaggcacagcaggatccagccgccatcttgtgcagatggaaccccaattgccatcaggagcagaagtcctttgtaatctgttactattccataggacccagaaacagggaacccccactggctcacagttatgggcatatggttgggtttcataaagtacaggctggagatgccacggagagagaggtggagaaggtccttagctctgtccacctgagccatctctgacctccacaccccaccagcacccgaatcctggtgtagctacaattaggtgaccacagatagactattgccaaagacctccatagaaataagtaggaaaggcgaactacagcaccatgccttcagtttgatatgtttacatatacaaaaaagtgaggagaacatgacctaaggtttctccttactgccacatctagtgcatcgtggtttcttctcttctcttttctcttatgtatatgagtacacagtagctgtcttcagacacaacagaagagggcattggattctattacagatggtggtgagccaccatgtggttgctgggaattgaactcaggacctctggaagagcagtcggtgctcttaagcactgagccatctctccagcccactcttttctttttttacttctctctctccctccatcccctcatggccctcttttcttcctttcttcctcctttctcttttctttcttctttcttcttttctctctccctatccctctttcctttctctccctttctcttctttcttgtttggttctttcttttctctctatctatctacataattagcatataatgagcttatgtggcttgtattatacgcgttctgttttttttttttttctggaagtagggataggagtttgtatactgtaggcaactgaactattccaacactaagctgtatccccaacctaagtctctctctctctctctctctctctctctctctctctctctctctctctctgtgtgtgtgtgtgtgtgtgtgtgtgtgtgatataacatgtaaagttaaattgttaacacatatataattcatattttttagtaattataaccagtgtctgattatgtttttgaaggtgaaggtatttaatgaccgcacagaaacccttacccactatgcacatgatcctttgctaattgctggaggtgctgaggaggatccgtagcacgcttcacaatgaatatattcttgtgtctcccaggaccttctcaagggactggagacagtcaaggactcgcttttcatcctccgtgaactaggagagcagcttggacagcaggtggatgtttccgcagcagcagccattcagtgtgagcagctctgtttcagccagcgcctgggggccctggagcaggctctttgcaagcagcaagcagtattgcaggtagggacccagtgactgtgttctggatgggtcactttttctgtctggagggaaaaacacaggaagcagattcttcagcgctgaaatgacacttcctgtaatactgaaacatcaaaaaaggaagaaagaaaaggggggtgaagcattagaagtcccctcggagtcaaggaaaggcagcagttttacactgttctctacaacttgcttttaaaattggtttggtttagcaggtcaacccataaatcatacccaccttcctagtacccagtatgccaacacgaagtggtttcaatggtagtatccaagtggatttagtagccttgaacaaaatccaaaataattcaaaaatagtttatgatgcatttaaacaatgaccttcattgcttattagggaaacaaagcaaacctacgcagacaaagaagaaaacactattcctgccccatcgctttcagagcagcatcccatgaaaggggctctccttagatgcttgccctttaactacatttcataaaagtgccagttcattccactaaaatgctggtttcttttgtgaaaacctaggctggagttgttgactatgaaacatttgccaagagcttagaagccttagaggtctggatggtggaagccgagggcatcctccaaggacaggatcccacccattcctctgacctctctactatccaggaaaggatggaggaactgaaggtaagtgtgtgtaaaccatgcttccagatttttttgtcttagggttttgctgctgtgaacagacaccatgatcaaagcatctcttataaggacagcatttaattgggcctggtttacaggttcagaggttgagtctattatcatcaaggtgggaacacggcagcatccaggcaggtatggggcaggaggagctgagagttttacatcttcatctgatggctgctagcagaatactcacttccagggagctaggatgagggtcttaaggaccacactcacaaagacacgcctactgccacaagaccacacctacttcaacagggccacaccttctaatagtgtcactccctgagcagatcttatacaaaccaccacaaccttgctcctcaaaatcttgagggaaactcattgccaaccactttcttccaagaccccactgacatgcccttagctcatcctttctgtccccctgagaggaaggaccactgtgctggtgatgggctgcccagcagagccctagcaggatcagtccttagtgatcagcccaacctttctttcctctgtcagtcccatcatatcttaaaaggcttctcccctagcacatctctaacatgattctctcccagatcagccaaccttacctcaatctatgcagcctcctcattgaccccttccctcttcccttttctcaaatacagagaccgttgtcttcaaagctttgcttaattctgtagattcaattagcctacattgtttccatataaaatcatcacattgataccacaactatttacactatgatttgttaattaataatattaatgcagcttttagaagaaaaaaattagtgaatcatcaatcattttaaatatttaataaacttaaaattaataatgcagtaggcttacaaaatttttatcatttatccttttgcttaaaatcctccatgtggaactggggagatggctcaatctttaggtaaatgcttgccatgtaagcataaggaccttagcacagatgtctaaaacacatgtaaaaagctggccattccatcatgtgcctttaattctgatacccatgcagctgagacagaagaatttctgggacttgctggtcagctcatcttgttaacttggtgagctttaggtacagtgagagaatgaagacaactcttgatgttgactgacttctggcttcaatgtatacacacacatgcacacatatatttgcacacacatgcatgtatccctgcacacagggacacacacatagaaacttgcacaaaattcttcagtgagttcctgtgctcttaagataaagagcatcactgtagaccaaggctgtcggtcatctcctggtcctaagctccccttcttgcatcagcatccatatacttctccaaccactggaagccgccctacttccagtatatgcacataagctttctgctttctggattctcgtcctcggtggctccctattctacaaagccagtgaatgcatgaccattttgctcaatgggactgtcttaagaagtctgccatctttatcaagggtcagactttccacttttatgagggatacaattctgttccatggtttatcatgacattcagctaggtctgggggagtgggagccgtgacatcctctctgtcgggcataaggagaagtatcatgtcacattagctttgtggatgtctagctatggaaattccatcatctagtacttaggcatttggttcccatgatcaggaagatttgcttccttagagatcatgagcccttcaaagagcatgcaatgaaagcatacactcatgcacacgcacacatacatgtacacacacaaacattcacatgcatgcagacacacacacatacacatgtacacacatatgctcacacacatgttcacacacatgcacacaggcagacacacagatacgtgttcacatacatacatgcacacagacacacttgcacacacacatatacacatgcatacagatgcacacatggtcatacatgtacacatatgcaaaaagaggaagggaggggaaaagaaggtggagatggagtagggagagagagaaagaacatcaaagtagactgacacattctgtttcctgtagctggcttactagatggagacaaagatcaccacaggagatagaacttcactttgttacaactcctggctgccattgggctggggcttctcaacttggaggttgggatcaagaatataaaactgatgtacatgtagtagttttcaaagcctggttgaactgggaagcttcttgcacctgggtctacacctagacccactgactgacatattgccctctcttccctccttcagcatcagagagggcactgccgtgatacttacctcaagggacttgtcttcaggataaaaggagtgattccttctgtccctattatgacaatgtttattcatgccaagagctgtactgcagttgctattgaataataacggagctgattaacataaatcaattaagtttaatgagtatttaatgaaactttcagtcatcggcataattttatcctccttctcttccatgaagagtaaaccaatcctgtaaatgagttattacacgtaagcttctgtccttcaaaggataatgggttcgaagtaacctccgcaaggcaagctgtggggatctgcacaagtcttcctctggggcatgtgtgtggccttgagggactccatagaccaaaggccacacaatcttcctgatatgcatggtttgaagtaaagaaaaaaaaaacctctgctttcttgacatggggttgaacttacttctcaatgtcactgacagggacagatgctaaagttcagcagcttggctcctgatttagaccgtctcaatgagttggggtaccggttacccttaaatgacaaggagatcaagaggatgcagaacctgaaccgccattggtctctgacctcttctcagaccacagaaagattcaggtgaggcgtcttaatcactccagcagtttctgtgtgtttcctggtgctctgacaacagtaccacagactggggagggggagtatttcctcaaggctggggatgtagctcaatggtagaatgcttgtgaaacaggggtcaccaccaccaccaccacccattcagtccctagctaccttcatccacataagcagagtgtactgacaaatgcctgtaatcccagcaaatgaaaggtctgtggctagttcaagatctacctgggctacaccagaccctgcctcaaaaacaaaacagcaaacagaagaagaaaaaatgagtctaatgtcttacagccacagactgtgggaagttcaaggttaaagtgccagaaggttttgttgtctagtgagagctggtttcttcttgctccccaaggcctccggaggagagaaacagccttttcccatgaaagaaagccaaagcacaagaggggaggacctcacaggagggagggctgcagggccgaataagcttttgaaattcccacctatgaaacataggtatattgacctttaatttttaatgcaagaattttgaagtgaacacattcaaaccatacaaccaaaaataccaggagaccatgaatttgtgcatatatgtgcatatatgcatatatgtgtaaaaaatatatatatatacatacacacacacacacacatctatgtgtaaattctagaactttccaatactaacaaaatgttttccagtagaaaacttaagttataatttctcttatttaaaaatgcaacccttgtcttaatcataaaaatttttttcaaatgagagtataatcatggggtaggtacagtttgaagcattcaaaaggtaacaatgtaaatgttgatgagtgaggattttaaagcatttccactccacatgaagtctttgtagtggtctgaccagaactgaggcagagaacactgaatctaattctgtaattggaagatacaaaggcgaccacataacccttctcccttgtctgtcatctgtcagcaagttgcagtcattcttgcttcagcaccagactttcttggaaaagtgtgagacatggatggaatttctggttcagacagagcacaagttggcagtggagatctcaggcaattaccagcatcttttggagcagcaaagagcacatgaggtaagtgacttgggcaacttttgagctaatggaaacttttagcggctcaggctatggctcagtgggtacaggagcctgctcccgatcctgatgccctgagtctcatccccaatatgcgtgtggtggaaagagagaattgattcctgcatatgagtgcttctgcgctcatagaccacacacacacacacacacacacacaaacacacacaagctaacaaaaattttaaacaaatttttaaaacttagggcttagccaggcatcagccaagctaatcctagcacttaagaatcagagacaggaagactggggcaagttcaagaccagcctgatctttgaaagatgtccatagtggatttcgatctagtcaaatatatgttaggtcctctttcttcttttgtctgtcaattttaatatttttaaattaaaatgtggtttggctctctgttactgtttagagggctatgttcattgtcatgatcatgtattgaagtatagagacttatagataaggagacaggttgactgggtatggtggctcatgcctttagtcccataactcggaggcagaggcaggtgggaacagtgttgtgtagcagtcccagcctcccaggagatttcgacaggagggtcacacatgccttgcagttgaaagtcaatctggccacgttggtgaaaagccatctcaaaataagcaatactaacagacagaggagagaattagaaatatcaatatctctatggagcattttgttatttcagctttccttgttttcaatctagtgagaattgaacctagggcctcatacataccaaaccactgctttttatcactgagccacacttgaatccttgcaggcttttgttatttacttttttaatgcacatgagatgattttacttgctggactacattgaaaaacagtgagctttaagaaaaagcagagtacaaattgcaaactcatcaacttattaggttaatttttaatgaataagggggggagaatacagctatgtttgtcatctaattaaaaacccaaactaaaactttgtctttaagtttatcctaattggtaattaaaaaaaaattactcccacactgcagatgggacagaatatgtttttcatagccctgctaaaaacaaactgtgagtaagttatcagaaaaaaaaattagggacttaaaagtgtgtctttctttttcaaattatagctttttcaagccgagatgttcagccgccagcagatcctccactccatcattgttgatgggcagaatcttctagaacaaggtcaagttgatgataggtaggatcttttataaattattatgaagaaagtttccccagtaaattagtcattttctttttaatgagagattagaggacatagatccaatcttcctaaggcaattgtatcatcacggggcctcagtaattggaggaaaggcttgtctgagtctctgcaatgagtgagcattgaatctttgcagaggatgctattatgtgatatgaagggcgtagggtaattggaaatcacctagccaaccttcgctagtctgtaggggctggagttagtgaatagatcagaacgggattgcagcgatggtcactgaacagttgctacgaatatctccctgcaccgactaaaatcttagtcctaaaaggggcagtggtatcacttgtctgactctgatggagagatagaaaactctagatgcacacaggaactgattggagcaaggtcgcataagtaaaagggagcaagaccaggcctgatgttaagggtgctctgtggccaggactggccttattttagcccattcccccagagcatatctctgtgtgagaagatcatttgctccctcaagccatactgtgttaaatgtgaaatctcagttctacatcccaacaaacaaactctttatttaaaacatagatgtgaaattctagcttcactcccaacatgggagttgacagcttcgtgtgtctacctttcctcgaaacggtattcatgtaatctagtttccatgtttatatttggggaattggctttagtccctatgtatatgtttctcgtactcaggaccagtaattgtgattgcaactaatggtgtgtttttaaacattaaaaaataaatcattttataattagcaatctagaagcaatttaagcctccagtggttattttataagaagttcatgaaagatttgtatggttaagattggaacaataatatgtgaggctgtacttactctattctaagcaagccaaacttaaatgtgaccattactgggaatttaagactctctaaataaaccaaattcaaatgtaattaccttttttaatcttttgctttatcatcccatagccagctctttagcagtattataaacattcaagtcattaagtaaaataaagttagaaattcccattccagccaacatctattaaaatttaaatgctaacatttaggagggggaaaaaaacacaaaagagatgaaaatgggagagttggaactaaataaagaattttgagagttgctagtgaaaaaaaaaaaagacaaattggacctgagtccatgggtgccaggagggtaccagacaagaaggacttaggttataaatgtcaatttatggggttatgttcttcaaacttcagcttcagcaccaggaagagtcattttcagtagctcagcaagggcagacaggttggggcagtttacatagtaaagacaggactccggattttagtactaatgtctatgttattcttgggacctgatgcatttcttcatgctctctactgttatcagaacttgggggtcacacattttctgaggtgacaggtatcctttaaaggacatgtcatgagtctagttgcctgtgcttggatcctactgtgatagattctactatgacacatgcctgtgagttacagaccagaatttctgttcacgagctcatgtgaccatcagaatctgcccattgccctagggaattcatttttaaactgagcataagaaattacgtgggtggtttttttacccagtacttttaatattttatagtgattaattggcatttattgtagaatttgttccaattcagttattcagtattttttagaagatatggcacatttggttgtaaattcaaactttacagtcatctcacatagtgtagaggtctagaatagtaatgagctctagagagcatagtataggtgttagaagtatcaggagaggttacatttatgattagccctaaaatctgccgagaaactcatcccatttgatgcttgacacattcttcttaaacaccacgtctgtgttacagtttgcatattaaataaaactttataaacaatgccaatactttttagaatggaaactaggaagaatgtgttcaaacactgcaacacctcagttggaattggagaagattcaagttaaatttactctgtctgaacaaccttcatatatatattgtgttgactaaagttagtttttcttttagaaaaatctgaaatttacctaaaatatacaagggatgatgtctcataataatatgcttgagactggagtcgtcacttgtagaagaatattaagaatgtatatgaagtatattttttaaaggaaaaataaaccaaagcttttaatttaatgtaatgtaagtggcttgattttgattttccaaaatggcatgtgattctagctggggtttcttgtcacgtgatgtcctgttgtaagacacaaaagactgtcacaggcctgtgagacagtgccagacatatacatacttaggatatttaggaaggagtataggataatcgccctagatttgatttttttctgttctgagatatgaaaacatacaccatttatagactggtaatctacctttaaaaattacttacaactcagcaaacagaccatggctaatttgaccatttatggaaaatatatactggctgatcctatgacaatacccaagactatgaatttggtacccccctcccatctaattgtttcttcaccagggaagagttcagcctgaagttgacgctcctcagtaaccagtggcagggagtgattcgaagggcccaacagagaagggggatcattgacagccagattcgccagtggcaacgctatagggaaatggcagagaagctccgtaaatggttggctgaggtgtctcatctgcccctgagtggtctcgggaacatcccagtaccactgcaacaagtgaggatgctctttgatgaagttcaggtaagatgcaagaacaggtccatgtgcctcttctgcaggtccactgtgtttgaccttggcctcggggtttcacatggactctgaagtggtctgaaaatcaaaacagacattcttaatattcaactgagatgcacaaagtgattgcattacaaagctcctgtggaaaggaagagagtagagcaatttgaagccatgccaaagatccctctactttgttcaccaaggcccagagcagttccttacagtccagcttggatggaaagacaacctggtgttggtcagggagatttaatcacataacctcactcgccccagccttgttagcctatctgcatatgtttatagcctttcttcctttaaaggacaaatctggctcttccttcctcccagtttcctcaagaaaagtcatatggcctcaaccaacccactcccaatagagaagggactaactgggatcttctgtccacattcagttactaaggttatgattcaaatgtgcaaccacctttaagacttatatatgtgtgcatagagccaatgacctctggaccagactatctccacactttagatccctaatcagaagaaatgttctaaccactttctgatctattgatccacaatctcaggagttatcccacaattatctttctcattgccactcacttcttgtattcagtcgaccttgaatgcccatccctgcgaccagaatatcaggagtccctgccttggtaaacagtagtctaacctgtctcatcatatacggtgcatgccttcttcattgtaccttttacccatccagtgaatatttttgctataatcagacacatcactcccctgctctaatggtgtgaaagccagatccctaggtgtggtagcatagttctgtaattccagtacttaggatgttaagacaagatgatcgcaagtccaagactagaatgagttacataccaatgcactgtctgaaaaggaaaaaacaaagtgtgattgtgagaggggtcagcacttaggaacactgaccactcttttgaaggactcgagtttgattccacttgattcccagcacctacacagcagctgccatcaccaataacattggttccagggcacctgataccctctttgtagtctcttcaggcactgcatgcacacagtgtacagagatgcatgaaaacaaggtattcacatgcataaaataaaataatgtacaaaaactcccttgcaagctgtcagcaccattctgccacatgcacttcatactccagccatggaaaagtccgttgtgttttctgaattaatcctctttatcttataaggtcagcacatccctccttgctcctggttaggaggacatcctttttctgatcacattcatctcattttaatctgattacagttacatgcctttcaagactcattgagctttgaccactttgagagacctactgtgtgcacccatgccaccctgtgatttctgagcatttgtcttacaagcagagttcatattatgtcgaaattttacttcccattcatttccacttgattaatttaagatgtcctttctggacacaagcatgtgaagtatgtatgccaattcataaggttatctaaatgtgattataatgggtgaaccagtaaagagaagactaaaaaataaaaggatctgttccctttcagttcaaagagaaggtgttcctgcgccagcaagggagctacatcctgacagtggaggctggcaagcagctcctgctctctgccgacagtggcgccgaggccgccctgcaggctgagctcacagacatccaagagaagtggaaggcagccagcatgcatctggaggagcagaagaaaaagctggcttttctgttgaaagtaagtgcagtgtagaatcccctcttaggagctgtgctgtttctgcctattgtttcatcacgatgcacatcattatagatccttgagcagccccctccagtgcttctcctctgttttatttaagactctgtcctatcttgcatgaactggaaaagtttcccaattttcacctcttcatctttcaggaaaaccccctaacagagtaatttaaactctaataaggctgtctaggtgattcattctgattaatggccaatgcagtgccttgaagcatgtgacagaaagccggccagaaactcaaagagcagatcccattccttaaattgtagacgctagacggttttaaagatcaatatctcatattttatagctggggaaaaggctaacccagaatgagtctctttatttgccttggtttatctaagcaggctgccattggccgaaagtctccaagaggcatcttaggcctttttgttgaccataggcacagtgaacctgaaggcactgagatttatccacattgcccataatgagcacctgtctctcatgtccacactagctataatttgtcttcagtccagttataaatatatcaacaatgaggaaactcatgaccttatataattaatatgtgctcataaaaaatgaaaaacaaaacaaaacaaaataaacaagtgccctaagttcagattaggctgtgttgaaaaccactatagcgttttccttttcttcagagtgggtgtgattgtaactcatctctatgactattgtgaagatttgtcaaaaggatgccaggaaatcatgagtgacacttgaacggcagtagttgccattcttttttttttttttttccattttttattaggtatttagctcatttacatttccaatgctatcccaaaagtcccccttacccacccacccccactcccctacccacccactccccccctttggccctggcgttcccctgtaccggggcacacaaagtctgcgtgtccaatgggcctctctttccagtgatggccgactaggccatcttttgatacatatgcagctagagtcaagagctcaggggtactggttagttcataatgttgttccacctatagggttgaagatccctttagctccttgggtactttctctagctcctccattgggagccctgtgatccatccattagctgactgtgagcatccacttctgtgtttgctaggccccggcatagtctcacaagagacagctacgtctgggtcctttcagtaaaatcttgctagtgtatgcaatggtgtcagcatttggaagctgattatggggtggatccctggatatggcagtctctacctggtccatcctttcatctcagctccatactttgtttctgtaactccttccatgggtgttttgttcccacttctaaggaggggcctagtgtccacacttcagtcttcatttttcttgagtttcatgtgtttaggaaattgtatcttatatcgtgggtatcctaggttttgggctagtatccacttatcagtgagtacatattgtgtgagttcctttgtgattgtgttacctcactcaggatgatgctctccaggtccatccatttggctaggaatttcataaattcattctttttaatagctgagtagtactccattgtgtagatgtaccacattttctgtatccattcctctgttgaggggcatctgggttctttccagtttctggctattataaataaggctgctatgaacatagtggagcatgtgtccttcttaccagttggggcttcttctggatatatgcccaggaggggtattgctggatcctccggtagtactatgtccaattttctgaggaaccgccagactgatttccagagtggttgtacaagcctgcaatcccaccaacaatggaggagtgttcctctttctccacatcctcgccagcatctgctgtcacctgaatttttgatcttagccattctcactggtgtgaggtggaatctcagggttgttttgatttgcatttccctgatgattaaggatgttgaacattttttcaggtgcttctctgccattcggtattcctcaggtgagaattctttgttcagttctgagccccattttttaagggggttatttgattttctgaggtccaccttcttgagttctttatatatgttggatattagtcccctatctgatttaggataggtaaagatcctttcccagtctgttggtggtctttttgtcttatagacagtgtcttttgccttgcagaaactttggagtttcattaggtcccatttgtcaattctcgatcttacagcacaagccattgctgttctgttcaggaatttttcccctgtgcccatatcttcaaggcttttccccactttctcctctataagtttcagtgtctctggttttatgtgaagttccttgatccacttagatttgaccttagtacaaggagataagtatggatcgattcgcattcttctacatgataacaaccagttgtgccagcaccaattgttgaaaatgctgtctttcttccactggatggttttggctcccttgtcgaagatcaagtgaccataggtgtgtgggttcatttctgggtcttcaattctattccattggtccacttgtctgtctctataccagtaccatgcagtttttatcacaattgctctgtagtaaagctttaggtcaggcatggtgattccaccagaggttcttttatccttgagaagagtttttgctatcctcggttttttgttattccagatgaatttgcaaattgctccttctaattcgttgaagaattgagttggaattttaatggggattgcattgaatctgtagattgcttttggcaagatagccatttttacaatgttggtcctgccaatccatgagcatgggagatctttccatcttctgagatcttctttaatttctttcttcagggacttgaagtttttatcatacagatctttcacttccttcgttagagtcacaccgagatattttatattatttgtggctattgagaagggtgttgtttccctaatttctttctcagcctgtttattctttgtgtagagaaaggccattgacttgtttgagttaattttatatccagctacttcactgaagctgtttatcaggtttaggagttctctgttggaatttttagggtcacttatatatactatcatatcatctgcaaaaagtgatattttgacttcctcttttccaatttgtatccccttgatctccttttgttgtcgaattgctctggctaatacttcaagtactatgttgaaaaggtagggagaaagtgggcagccttgtctagtccctgattttagtgggattgcttccagcttctctccatttactttgatgttggctactggtttgctgtagattgcttttatcatgtttaggtattggccttgaattcctgatctttccagaacttttatcatgaatgggtgttggatcttgtcaaatgctttttctgcatctaacgagatgatcatgtggtttttgtctttgagtttgtttatataatggattacattgatggattttcgtatattaaaccatccctgcatccctggaataaaacctacttggtcaggatggatgattgctttaatgtgttcttggattcggttagcgagaattttattaagaatttttgcatcgatgttcataagagaaattggtctgaagttctctatctttgttggatctttctgtggtttaggtatcagagtaatagtggcttcataaaatgagttgggtagaataccttctacttctatcttgtgaaaaagtttgtgcagaactggagttagatcttctttgaaggtctgatagaactctgcactaaacccgtctggtcctgggctttttttggctgggagactattaataactgcttctatttctttaggggatatgggactgtttagaaggtcaacttgatcctgattcaactttggtacctggtatctgtccagaaatttgtccatttcgtccaggttttccagttttgttgagtatagccttttgtagaaggatctgatggtgttttggatttcttcaggatctgttgttatgtctcccttttcatttctgattttgttaattaggattttgtccctgtgccctttagtgagtgtagctaagggtttatctatcttgttgattttctcaaagaaccaactcctcgtttggttaattctttgaatagttcttcttgtttccacttggttgatttcacccctgagtttgattatttcctgccgtctactcctcttgggtgaatttgcttcctttttttctagagcttttagatgtgttgtcaagctgctagtatgtgctctctcccgttttttcttgaaggcactcatagctatgagtttccctcttagaaatgctttcattgtgtcccaaaggtttgggtacgttgtggcttcattttcattaaactctaaaaagtctttaatttctttctttattccttccttgaccaaggtatcattgagaagagtgttgttcagtttccatgtgaatgttggctttctgttatttattttgttattgaagatcagccttagtgcatggtgatctgataggatacatgggacaatttcaatatttttgaatctgttgaggcctgatttgtgacctattatgtggtcaattttggagaaggtaccatgaggtgctgagaagaaggtatatccttttgttttaggataaaatgttctgtagatatctgtcagatccatttgtttcatcacttctgttagtttcagtgtgtccctgtttagtttctgtttccatgatctgtccattggtgaaagtggtgtgttgaagtctcccactattattgtgtgaggtgcaatgtgtgctttgagctttactaaagtttctttagtgaatgtggctgctcttgtatttggagcatagatattcagaattgagagttcctcttggaggattttacctttgatgagaatgaagtgtccctccttgtcttttttgatgactttgggttggaagtcaatcttatcagatattaggatggctactcctgcttgtttcttcataccatttgcttggaaaattgttttccagcctttcattctgaggtagtgtctatctttttctctgagatgagtttcctgtaagcagcaaaatgttgggtcttgtttgtgtagccagtttgttagtctatgtctttttattggcgagttgagaccattgatgttaagagatattaaggaaaagtaattgttgcttcctgttattttagttgttaaaggtggcattctgttcttgtggctgtcttcttttaggtttgttgagggattaccttcttgttttttctagggcgttgttcccgttcttgtattggtttttttctgttattatcctttgaagggctggattcgtggagagataatgcgtgaatttggttttgtcgtggaatactttggtttctccctctatgataattgagagtttggctgggtatagtagcctgggctgcagtttgtgttctcttagtgtctgtataacatctgtccaggctcttctggctttcatagtctctggtgaaaaatctggtgtaattctgataggcttgcctttatatgttacttgacctttttcccttactgcttttagtattctatctttatttagtgcatttgatgttctgattattatgtgtcgggaggaatttcttttctggtccagtctatttggagttctgtaggcttcttgtatgttcatatgcatctcattctttagatttgggaagttttcttcaataattttgttgaagatgtttgctggacctttgagttgaaaatcttcattctcatccactcctattatccgtacgtttggtcttcttattgtgtcctggatttcctggatattttgagttaggatctttttgcattttccattttctttgattgttgtgccgatgttctctatggaatcttctgcacctgagattctctcttccatctcttgtattctgttgctgatgctcaaatctatggttccagatttctttcctagggtttctatctctagtgttgcctcgctttgagttttctttattgtgtctacttccctttttaggtctagtatggttttgttcatttccatcccctgtttgcatgttttttcctctttttctgtaaggacttctacctgtttgattgnnnnnnnnnnnnnnnnnnnntccttcttgatgtcctctaccatacatcatgcagatatgcttttaaatctaggtctaggttctcaggtgtgttggggttccctggactgggcgaagtgggtgtgctgggttctggtgatggtgagtggtcttggttcctgttagtaagattcctccgtttacctttcgccatctggtaatctctggagttagtagttatagttgactctgtttagagattgttcttctggtgattctgttaccgtctatcagcagacctgggagacagattctctcctctgagtttcagtgctcagagcactctctgctggcaagctctcttacagggaaggtgcgcagatatcttgtatttggacctcctcctggccgaagaagaaggcccaaaacaggacctttctcagacactgtgttgctttggcagttcccaggtggtacagactctcacctaagcagactaaattcctaagttccttggagtcccgggaccaagatggcgaccgctgctgctgtggcttaggccgcctccccagccgggcgggcacctgtcctccggtccggaaggtggccggctgtccccggcccacacagggtgctgcctcagcgcctctgtgcttctgcctgttccagaagctgtcaggttctctggcgcaccctctcacctgttcagactaatttcctaagttcggcgggtctcggaccaagatggcgaccgctgctgctgtggcttaggccgcctccccagccgggcgggcacctgtcctccggtccggaaggtggccggctgtccccggcccacacagggtgctgcctcagcccctctgtgcttctgcctgttccagaagctgtcaggttctctggcgcaccctctcacctgttcagactaatttcctaagttcagcgggtctcggaccaagatggcgaccgctgctgctgtggcttaggccgcctccccagctgggcgggcacctgtccttcggtccggacggtggccggctgtccccggcccacaaagggtgctgcctcagcgcctctgtgcttccgcctgttccagaagctgtcaggttctctggcgcaccctctcacctgttcagactaatttcctaagttcggagggtcccggaccaagatggcgaccgctgctgctgtggcttaggtcgcctccccagccgggcgggcacctgtcctccggtccggaaggtggccggctgtccccggcccacacagggtgctgcctcagcgcctctgtgcttctgcctgttccagaggctgtcaggttctctggcgcaccctctcacctgttcagactaatttcctaagttcggagggtcccggaccaagatggcgaccgctcagtagttgccattcttgatgtcattaacacttaaaaaaattgtacccaagaaatgttgaattttatatacattgaaaatcaccaattcttcctgattgtaagtacagtgtaccatcattttagatggagggagataactcacagtaattgagtagatttattgtttcaaatattcacacccaagctagtcgtggtggcgcacgcctttaatcccagcacttgggaggtagaggcaggtggatttctgagttcaaggccagcctggtctacaaagtgagttccagaacagccagggctatacagagaaaccctgtctcgaaaaaaagcaaagatatatattttttttttcacacccattgggtttatgttgggaatcttatgcaatatatatgaccttctgaataggaaacagcctagcaagaatgtcactgacatgtattaagtaccactctttgcttacagagcaattcactggtaacataatatgcctgactcatttgacgtcatccccgtgtcaggcaaggatttaaatcattgtaactcactctgctgagactgcggtgattatgttacacacacacacacacacacacacacacacacacacacacacacacacatatatataatgtatatatagtgtatgtgtatatatatatatatatgtatatatatatatacacatacatacatatatacatacatatataattcatgtatgtatgtatcataattcatgatgtggtttttggagatagtcccaagacataaataagaatgtgtggcatctgagtcactgggtttgtttgtctcatctgtcagttggtgtgtataaaacattcattctgatagacagtttgcagaagaatacctgaagctagttccttatcattcatgcagaaaaaaaaaaaaggctcaatggtggcttcaccatacaagtcacctttggaaagaagagtcccctattcttctcttgtcaggattttttttttttttaattttgaatcatatattacattctgtttgcctaaggaagccttgttccacgtttgctcgaccttattttaatgtagctttacaccaatgctataataattctctgtctttagctgttagcctaatgctctgggtatgtatgcccaaaatcgttatgtttttcctgctctctaatgtcaattttgtcccgaggcgtggcctcctcagtgtcagacctgacactgcacaggctccgctgacagctttgggactgatttgtgctgatttaattgttacgtcaaagcagacgggattgtttgcttacaaatcatttctacagtactgagcactggcaaccaaaagtaccacagaatatcgtaaaatgaagggaaattgagcttcaaagaccaaagccttcctagtttggcttacagggtgcctctgttggtgctgactagggaggaggtgctgctctgctgctctgtagctctatgagggaagtttcaagagaaatgagaatctggtttcaaactctcacagaacaaaagaactaagcttgcacttgcaaatttttttggtaaacatgtctggagtaatattacctgtgggttgttaataagaacctgttagggaaaaaaataggaaaagctgaggcgagagaagacaggggacaaaggaagatagggaaggaaagagaaccagacttaggtaccgtgtaggtaattctgcctgttaaacccattgtctttagagttcagtaatgcattaggtggagaatgaccactgagctgctgctcgggagggtactgggagcatggtgaccaggagtggacaatacaacccatatgggagaattagacaaaacagggtatttacttaactgaatgctatctgacatctactaagatacctgatgataattaacttacaagtagcgctctataaaaaacaaaacaaaatcaacactcagcatggttcctctcacattccttttttaaattttagtttaagaattagacaaaaaataaatgtgccattaaaaacttgaggtagtagttgtggtatgttgaaatcacccttgtagcaccttcccaagttggctgccattcccaagaggcagcccctgttaccagtttggtgtgtcacgtttccaaatgggcagacaccaggcataattttccttgacttcaatcaggtatccaacatgcacgaggctgtcattctcggccacatatcctgcgtcagtgtcacagcatgtgtcacgagacagatatttcttccagttcctgctgagtaggtgtttcagggttaacacataactcttccagacatatttcagcacaagccaagggaagccagacagacaccatgtctgtaatacctgcggttcttgtgtgcttgcacaccaaatgtgggtggttcatactatgcctagagcgaatcagagttaagattatatcatctttacattctgtctttctcttactcctgcttgtttggattccaaaaagatgcgttttgtctcattgcgttacagccccgtggtacatttgggagcaagtagatactcagggctcttgtgtgtgaatagggagagagacaggaacgagatgactttcccactctgcccagtgtttgattcggactccatgtttaaatatccaaagttaaacattctttggatattgtgcttgcttggtgccctgatagccattgctgacattaattcttccacaactgtagaatttacttccattttctcaagaaaagtgtattaccacatgcttcatagagacaaacagccaaagagtcacagagtcaagttgaactgaactcttatgatgataaagacatgatgatgttcaaaatggcagtgagtgtggacctgccttcccacaattcactggtataattatatccctggcaattaaagcaaatatttattttcattttatagttttgcaatttctcaccaaaaaaagaaaaatgtatacaatttatttctcctctattgataggactgggaaaaatgtgagagagggatagccaattctctggagaagctccgaatgttcaaaaagaggttatctcagcctctacctgaccaccatgaggaacttcatgcagagcagatgcggtgtaaggtacagtaactggatggagactgtctgcattgccttcgtcacgtacttctgcctgtgaggtcatatctcagcgagactcccaagggagcccatgagtgtgtgagggcctgggagagcccgttagggtagcctgcactttgacgagagacttgttttgctgatttaatgcagctgcagtttatgggtgacttagaggaagggaatgaaaagtttaagacacaacataaaaaatatttaaaggctgagtcaagaacaataaatagctgtctttctgaaacacccccactggggaatcattctaatgaaagtctatttgatggaaagaaggacagggttgacatcttgaaaaatctgtggactgtggcagaggagcataccctacctgctaggtccctctgtacaggaagaaaaaaaaatagctgatatctatcaaagcaagaagtcacccaatccttaaatccttcagggtagagccacttaaggactatggccgccacttccaatcttagttgtgatcacctcccctaattgtcctgggaagcaatcagcagtaacagagaccacgccctggtcgacaaggtcacgaagaccagcatgatctgacttagtggctgtaagatttgtgcacacggtgtagccaagttgagtgctgggccagcactgagtcatatgctgattgcatcaaaagtaacttcacaaatgcttttctttccctgtgtgtgctcagtcatgcttacattactgctttctgataatcctggctaaaaagatataagagacactcatggaaattaaaaggtgatttacagtgcaccaaagatgatgaatagaatatccatctctgtatattaccctaagatgcatgtgaaggttggctgatgtggtggcattaagaatctaagacaggaagaccctgagttcaaacctgggagacataacaagtccctgcctcagaagaaaactatgtgaagactatgaacactaaaaggagctaattttaaacttatattgttaatttactaaatgaatcatctgatggaatgggtgtggtctaataccaggtcacacaccccaaaacaccatataccagttgtatctcacgtggcatggcacaagcccatgggagcatcattatttcctttatgctagatgagaatatggaagattctagaataccattaatgtttcacattaataattgacagatttgtctaaagttagagactgtattttagccacactgccttagcgaatgggcagagtctaaaccagtggacttgggttcggatggtagtgttacttgtgtgcatatgtgtgtgtggagtgtgcctgagtgtgcttgtgtgtgtgtgtgtgtgtgtgtgtgtgtgtgtgcgtgcgtgttttcttttccttgtgtttggcctgatttgattttagagagggtttaactgttgaacccaggctgccctcaaactcatagaatccccatgccccagactttagagtaattctgggattataggcaagtgttaaatgtgatgttcgagttgtgaggaagatagggcttgatagataatacagcagtaaggtccttacacttgtatagcaatgtaatctgttcgaaaggtacagacagaatgctggatatgtattaacctagatagcttggtcttttggccagtcattcttattttgagaccccattctcatctccccaaacacttggaaaagcattctgcttttgaacttggagactgggagaatgtatttccatacagcgccattatgttctttcccaaatcaccctccacagcaaaacaaagcaattaccagaaaatttcaggctaaaaccttgtttgctgaaattgcctggaaaggtagcctcagatagtgccgttaattactcttgcctttagaaacttgtctctggtgtgaagagacaggaaaggcagaggagaagtggtatgaaattctccattcatacactaaatgagctggaacctgaaaacaatggctggcagagagggagagtgacacaaatggcagaacctgtccaagcatggaaggaaacctctgctcgttcacattgaatttccttaaacaatgctcccaaaggacaggtctatcatcaagaacttcaataaatctctgatcctacagaatgtgtacttagtgagttattttgaatacaggaaaaactgtgacaaattgatatttcatgataaggatatatcacagaataggtcaactcagcattcaaaaatgaagttcaagttaggaaatttttcttttaaatatttcactagtgtgatcaggaacaggacaaaactagtgggtggtttggtaatcagtttaggtatatttatggtctcaggattgtagaatgagacatatttagaataaagaaggccattaaagtgacaaacttggatttggaaaagtcaaaagcaaaaacaaacaaactaacaaccccaccaccaccatcctagaaagactacgtatatggtggaaagtttcagcagggacattttttttcagaagaaagtggcaggctttcaagttatgtaggatgcaaataaggatcttgagtgtggtgttcagaaagagtttatatcaaggaaatcccggtgagacaggtcaccaaagacccctcaaaggattgaaggtagatgttgtgggtgttcatggatgcttgtctcactgtaggaactggaaaacgcagttgggaggtggacagatgacctgacagagttgatgctggtgagggatgccctggctgtctacctcagtgctgaggacatctccatgctgaaggaacgcgtggagcttctgcaaagacaatgggaagagctttgtcaccaggtaagctgtggtctaaatgaataagtagcccctcgtgatgggaaggctgagggtgatccatgatgcaagacatgcctgatccgtatctcaacccaccccatgactcatacataaacagaggagggtgtggttgttgccagaatatgttagaacaaggatacctatatcatcatattatacttgaattcatctgtaccgaagcatttattttttcttccctggctggcacaaactgctgtactttctaggtgtgaattttcagctgggaaggtaacagtagtatgttctgcattttaaacacagaagaaatgcattgttttggttttacttagagttctagaaataattttatttgtggaaagtttatagtcattccttataattcactgtgtatggcattgttaggtttacatcatttattaaatgcctttctctttctggtgagaagggactacctgctggtttttgtttttgttttgttttgtttttttggggagcatattctactttattaggattcccatttcctcctggttatgtgccagcatggatcatagtccggcgcattcccatttcctcctggttatgtgccagcatggatcatagtccggcgcattcccatttcctcctggttatgtgccagcatggatcatagtccggcgcattcccatttcctcctggttatgtgccagcatggatcatagtccggcgcattcccatttcctcctggttatgtgccagcatggatcatagtccggcgcattcccatttcctcctggttatgtgccagcatggatcatagtccggcgcattcccatttcctcctggttatgtgccagcatggatcatagtccggcgcattcccatttcctcctggttatgtgccagcatggatcatagtccggcgcattcccatttcctcctggttatgtgccagcatggatcatagtccggcgcattcccatttcctcctggttatgtgccagcatggatcatagtccggcgcattcccatttcctcctggttatgtgccagcatggatcatagtccggcgcattcccatttcctcctggttatgtgccagcatggatcatagtccggcgcattcccatttcctcnnnnnnnnnnnnnnnnnnnnnnnnnnnnnnnnnnnnnnnnnnnnnnnnnnnnnnnnnnnnnnnnnnnnnnnnnnnnnnnnnnnnnnnnnnnnnnnnnnnnnnnnnnnnnnnnnnnnnnnnnnnnnnnnnnnnnnnnnnnnnnnnnnnnnnnnnnnnnnnnnnnnnnnnnnnnnnnnnnnnnnnnnnnnnnnnnnnnnnnnnnnnnnnnnnnnnnnnnnnnnnnnnnnnnnnnnnnnnnnnnnnnnnnnnnnnnnnnnnnnnnnnnnnnnnnnnnnnnnnnnnnnnnnnnnnnnnnnnnnnnnnnnnnnnnnnnnnnnnnnnnnnnnnnnnnnnnnnnnnnnnnnnnnnnnnnnnnnnnnnnnnnnnnnnnnnnnnnnnnnnnnnnnnnnnnnnnnnnnnnnnnnnnnnnnnnnnnnnnnnnnnnnnnnnnnnnnnnnnnnnnnnnnnnnnnnnnnnnnnnnnnnnnnnnnnnnnnnnnnnnnnnnnnnnnnnnnnnnnnnnnnnnnnnnnnnnnnnnnnnnnnnnnnnnnnnnnnnnnnnnnnnnnnnnnnnnnnnnnnnnnnnnnnnnnnnnnnnnnnnnnnnnnnnnnnnnnnnnnnnnnnnnnnnnnnnnnnnnnnnnnnnnnnnnnnnnnnnnnnnnnnnnnnnnnnnnnnnnnnnnnnnnnnnnnnnnnnnnnnnnnnnnnnnnnnnnnnnnnnnnnnnnnnnnnnnnnnnnnnnnnnnnnnnnnnnnnnnnnnnnnnnnnnnnnnnnnnnnnnnnnnnnnnnnnnnnnnnnnnnnnnnnnnnnnnnnnnnnnnnnnnnnnnnnnnnnnnnnnnnnnnnnnnnnnnnnnnnnnnnnnnnnnnnnnnnnnnnnnnnnnnnnnnnnnnnnnnnnnnnnnnnnnnnnnnnnnnnnnnnnnnnnnnnnnnnnnnnnnnnnnnnnnnnnnnnnnnnnnnnnnnnnnnnnnnnnnnnnnnnnnnnnnnnnnnnnnnnnnnnnnnnnnnnnnnnnnnnnnnnnnnnnnnnnnnnnnnnnnnnnnnnnnnnnnnnnnnnnnnnnnnnnnnnnnnnnnnnnnnnnnnnnnnnnnnnnnnnnnnnnnnnnnnnnnnnnnnnnnnnnnnnnnnnnnnnnnnnnnnnnnnnnnnnnnnnnnnnnnnnnnnnnnnnnnnnnnnnnnnnnnnnnnnnnnnnnnnnnnnnnnnnnnnnnnnnnnnnnnnnnnnnnnnnnnnnnnnnnnnnnnnnnnnnnnnnnnnnnnnnnnnnnnnnnnnnnnnnnnnnnnnnnnnnnnnnnnnnnnnnnnnnnnnnnnnnnnnnnnnnnnnnnnnnnnnnnnnnnnnnnnnnnnnnnnnnnnnnnnnnnnnnnnnnnnnnnnnnnnnnnnnnnnnnnnnnnnnnnnnnnnnnnnnnnnnnnnnnnnnnnnnnnnnnnnnnnnnnnnnnnnnnnnnnnnnnnnnnnnnnnnnnnnnnnnnnnnnnnnnnnnnnnnnnnnnnnnnnnnnnnnnnnnnnnnnnnnnnnnnnnnnnnnnnnnnnnnnnnnnnnnnnnnnnnnnnnnnnnnnnnnnnnnnnnnnnnnnnnnnnnnnnnnnnnnnnnnnnnnnnnnnnnnnnnnnnnnnnnnnnnnnnnnnnnnnnnnnnnnnnnnnnnnnnnnnnnnnnnnnnnnnnnnnnnnnnnnnnnnnnnnnnnnnnnnnnnnnnnnnnnnnnnnnnnnnnnnnnnnnnnnnnnnnagtgttgtttgcctatggggaataatgaaggcaatgtcctccgtatatgtcctaatacttaggtacctctgaggataaaaataatgccagaattatcatattttggagatgaagaaattgatagtcatatgatgatttctcattcaggcaaatcgtgtaatcattccatgaaagtattattattactaactaagtcagacattcatattttctaaaattgtcgatagagtacatatatctacttgaaaatacagcttgaaagtggtgtttggccacatgatatgctctgaggagatttatacactgtgcctgtgagcaggccaaaacctgaaaaaaaaaaaaaaaaaaggaagtagatagagtatgcttctaggatcttcctctgccagactcctgaggtatgaaactaacacataattattctgtcccagtccaatctacactcgagtgtttaaaccagtgagatagtagttttgggtctggccaggtgccaggatgtaatacttctggaggagagggacccagaggttttagtggctcctgggtttgtcatttccggtgaactactgtcaaatatgaatccaaaacaggaaacaagccagtgctctactccttgtaaaagtcgccaaactctgctgaacacagatggcgttacgccagctcaggaggagccagccggctctgctcccttcgaagcggctgatgtgcaggagtaactgggagggtccacagatgaggatgaggaagccagcttcaagcagatgcttgggagcatcagaagaaaagcaaaagggaattggcttttcagctgcccaagggatctgttgtagctagctcccttgaggattatattgcttttcttcctctgttgcttgtatagaactatgtgtgattctagctgtaatgtaaatatataacactgcaccactagaattgctcatgtatatgcatttgtatgtgtgcatttgtgtgtgagtgtgtgtgtctgtttacacccacccacaatgtcttgataaaaacacttactgttagaaaaaaaatgtactacctattcagctgtctcactctggaggcaatataccatggcggcagtacccttaagacaatatatgtgctgagctggtaaatttcagggtttcaactgaatccaaagaaagaaatggttcatttatatatagcttggatatttagtttataaacaacatcaaatgccacccttcttagggatttacatctttgcaaaaaaggttttggccctggcttgcacccaatgcttgcagcccacatatttagtttttggtttttttttttcagtcatagctccacagtaaacaaatgaaagcagtgtcatcatgttgtgagacaaacaggaaggatgcatattcaaactgctccctggagacattgagcacatgaatgctaagaaggaaaaactatcaaactaacacaacattgtcaaacctgtggtgtttgacagtgctttttaaattgtcacttgcctgtgtcttcctgtcaacacaccacatcctgggatagatatagtacagcacttgacatatgaaaggtgatcgatcatttgttacaaacactaaatactagtgtttggagaaaatgcagtgtcaaatgagaaaagacaggctcgtagaagatgagaaacttgctctatttttgatggcagagtagtggagactagccttgagtcttagctgcgtctggacatgtgattgatccttctataaattacagcctagagcaaagactccagctttactgagcctacctttgactaaccaaaagccaatcacttaaactgcctaattcactctgggcacatcaacttctcaaagaaataggtgatttccttttatcgtgtgaccaccctctctgtggatgttggtgaagggggagccctagcatatgttttctgcatcatggccaacaagcagaggaagctactcagagggagacaaacccatctcaactcttaaggagggagcttcttttctttagaggggagtcaccaatcctgagaatttctgcttgtatcagttgaacctaagctgtagctgcagccaccccctcctgtctgatactgtaggatgacggatgaatcccgagtcttggtgttccagaagagcagatctctctgtgcttactggttgtgctgtataacacagtctgggtagatctcgaagtgggtgggatttctctctagaacctttgaactgctgctcactgttaatcccccccggaaatgagctcgccaccattcgtctcccctgtattattctgcctcaagggaaactaagtggtaaactaagttatattagtgagacaatgctggtaaactcaggagttattgccaacccagaggaatattttatttaactagacatgcttaactcaaaggcaggaaatcctaatggacatttctcaaaagctgtggtagtcaagtatctcatttccctgaggttggccttgtgcaaggtgttaacctgatctcagaaaagaacatggacaaatggggttctatgaggacttaagtcttatctacttaccactgatggagccgataactaagacacataaggcatctttgaaatgttttcattcccatattaaaaaaataatttaaaatacattttaaagcaggttgctatgtatagtggtccaagcctataatctcgaaactcagacagaaggatcaccaccagtgattgtatttttaggaaaatacctaaagaaatgagtacctatacctgtgcagacacttacgcatgaccatatgtggcagcattgctcataggaaatcaggattaaaatcaacagaaatgtccacaattagatgaatagacatgtaaaacagacatgtgtgcagtggacggttctcagcagtcagaacggattgtgggtttatcatttaacatggcttaacatgtgatgcatgctaactgaaagaagcatgtcacaaaagaacacaaactgtgattccaacctacatggaacgttgggaacagggagatacatagagataatagcttagagctgcgggaagtgtggagagaacagagaatgacttcttatacccagcaaggttctctactgggacaaagccgtgagagagagagagagagagagagagagagagagagagagagagagagagagcatgtgtgtgtgtattataaaagctgatttagtagattgctcatcccagagggcttgggtggtatgacacttccacctgcatgcttcatagactcagaaaacaaacaaaacgataaaatggccaaagctacttagttacatgaagctgcatgcctgggtggtcccagttcgggctgaaggagttctctggagagacactggctttcagtctatcctggagatctgaaggatctagagtaagacattagtggatagtacagacacagggatagccacactcactcaggaaacagaatcaaagacatacctgccgatgctgctccattcttctgagacctctctatatctgggctgatgagtggaaagtaccatctgcttcaagggtggatcttaaccctccagtcattcacagatgggtgtatgcgccagaagtgtgccttctagatgagtctttaacccatcaagttgaccgtcaagaccaactcccatgctgctgacagcagtgttgtttgggggttggggcattaaaatattctaaaattgattgtgttcatagttgaacaattctgaatatacaaggaaatactcagagattgtgttaggtaagttatatctcagtgaagctaaaataaaatcagaccaaaaaaaaaaaacccaaaaaaacaataacaacaaagaaataaaacaccttcttggtcttcataattccagataaaggatactcaccttgtatactgttctatattttctttaatattctgtgttctgtagtttaatgagaaattttgattatgtttaaaaagttaaaagctaaaaactggatctatacaatgaaaaccaaaattatacaaataaagaaggaaaagagacaaaaataaatgaaaaaatgtacataaatggagatatgtaggagattgcttaggggtgaaatggtcagggcagagctgagccccagggatcatttcctgtttatggctgctcttggaaaccactcagccctctctccagttataggagactgaactgacttctctctctattccattctgttcttccctccttctattaacaaataaaaacaaaacacaaacatttatttatttgtattttacgtgcaagagtatttgctggaatggatagaaatgcgtgtgatctgatgcctacggaggccagatgagggcatcggatcccctggaactagggccgcagaaggttgtgagccatcatgtggatgtcaggtgctgagcctgaatcatcttccagagcagcaagtcttcttgactgctgagagcgcatcattgggagctggagtttcagagagttgtgagccatcatgtggtgtgaggtgaacctgagttctctgcaagagcagccattgatctgagccttttcttcagcctcttttttgctctatttttgttcatgtcagcaaatcctatatttcaggaaacagtaggctgcaggaatgcccaggtcttgcccacttcagttcactcttccctccttgaagtaggatttgctctccctctcacaatctcgatctattctaaactgccaggtctccctacgacgacagcaagtaagcgagcgcctgaatgagtgggctgtcttcagtgaaaagaacaaggagctgtgtgagtggctgacccagatggagagcaaagtctctcagaacggagacattctcatcgaagagatgatagaaaaactcaagaaggtgagaagtgtgaggcagcctggactcccttcttcccagtccttcccctgtgtctttaacataacaccccatctctatcgcttccccagctgaggacagtgtattaagcctcggcttcataacatacagcaggcccatgtggaaagagcaactttacatgaagaatttataggatgtgtttagtttgtgaggaaatcaactctttgctttttgtcttggaggaatcatttgcacacaccacttttatcttaatcctgtctgtggtttggtttgtagagagagacattgctacaggggaattaaaaggaaaaatccttagggtgaattaaactgaagatttaccttagaaaatatgatctatagtccatcaaaagtgctggattcctgctatttcaattgtctatgcattattagattatttttgggttcattttgatctaggacatttttctgtctatgcagggctcactaagctgactcataattttaaatatttgtgtgagtttcaataaagtttctacatttttgggcaaataatcatgtcaacatgttggtttgtatctctcactagcatacatatggtgttattcatatttacctgtttgctagctgtctggaggaatagcctcattgagctgcaaacctccccggaacataaatgttgtctgtcttgtccattactcttgtccctacatccacagcggtgtttgactcctcataaacacaccatattttctgaattcagagatgttagatttattcattctgaaaagccaccaaagttattattaggaaaatttattgttctcagtacacacacatacagagaaaagaaagccaggacatagcatcgatgactttattagttttctacataaaaatgaaaaaatttcataagtaatcaatttgctcatttgatatcaaaacccttatttctgggccaagataatacaggtttcatcatagcatgtgctaacagtgcggctttgctggttgctatgtgtcaaagaatgttgtactaggcaggactaatgtactagttaccataataaaatttgctaaagagtaattcttggttaggtgtgtttatattctcattgcttttcagaatgaaattcagaatgtatattttgggagtagaaaaacactttctaggacaaaatagagccataatttatattactaaaactttagtctctcacgtggatgattttattctagtctttggtaggatgtcagagatattctttgagcaggtccacctggtggtttgggcctgtcatattagcttcttgtgagcctgaggcagaactatctcatgtgcaaggtcctgcctggcctaaaaagtaagtacaaggctaacccaggcaacttaataagacctattcataataaaaaatgaaactaaggagggagaagggaagtggtactgagaacatagcctaataatgaagtacatcctaaatgtacatgcaacccttggctcaatcccagcaaagcaaagaaaaaaagtaacactctataatattaattctattagtttgcctataaagtaagttgtggaactaaaaaggccatccctgccttgtcctccttataaatgtgaatcattgctgagtactgagtggagctcagtattctcaacagagtaaggcagacaaaataatcgattactagaggccaactgttactgttcattggcatcaacacaagcagtttaaattacaacccaagaggacagttttactataagtgcattttaaaacttagagtagttttgttgagatcaacatttctcaatgacatcatcccaattttgtgatgaaatgttaaaaatattatgcattcagtgttttggtttttggacccctgattgttgaaaaaacgtgacagggttgaggagtcatcattatgcccagggcactcaacttttaggtagaatggagcctcacccgtcatcttctttcaggccctctttccttaaatatatggtttatagggtatcctagctttagaggaagagttaaaatgtacacatagaacctatcttcatgtggtttttaatttgattggacatatcctgttatgtcaaatctttctctgattcatcacttcgtctggcactcaattagacagtactttcgaatatggctgcttctttctacaaactaactttaccttcattgtttgggattaaaggtgtgtactatgggtgatcaacaccacaactagaaacaggtttttgtttgtttgtttttttagtaaataacataatcttggggtttacactgtgatcaagtatcctataatacccatagcttacatattcagccagttgatctattcacttggctctagatatcctgtttcttcctcagtacttagggattacatgaaaggtctgctgttacatgggttctagggaatccaaactttggtcttcacatttatgctttatttaaggagtcatctttccttgtttactattttcctgagatactctctgctgtctaacaaagttgcaaagtttatccaaaaactgggtctgtcttacagacagcaaacagaccacataacatacctgttatcatcaaccagtctttaggaggggctaccacagagactaaataaaccaaggtatgagacccactgacatgctgaaattaatgattattagtcttgaggactgatttgctattatgtgtggcagaagattgctctaaaatagatgaagtcaaagtattctgtacagataacatgactgacatgatctgtataaagtcttcatagctgaaaagatgcatataagtaagtgcatatgtacacattcatgtgtgtacatatataattatggcacagatatgcatgcatatgtgtgcacgtgcctcttaaacctggcattagcgattcatttccttattgattctaggtatgctataaatcatctgctaattctttcaagccaaggcttcttttgtctatgcatattcctttattgtgtttgatttgtttctttttgtagtggtagaacttaaactccagtcctcatcagtgctagaaaagcgacctatccttgagctactccactgatccacactatatatttatatctctatatctctatctatctatctatttatctatctatctatctatctatctatctatctatctatctatctatctctttgttttttgagaaagggtctcatgcatctcaggatagtcccaaactcactacacaggtaagaaaaatcttgaactcatgattttcctgcctctacctttcgagtgctgagattatagccatatgtcctcacaccagtctggtgccctttaaagtaaatagaaagtgccttacagtttctctcagataatctgtgtaataattgactctggactccacgttaccaggagcaataggcactattaattcttgcgcacatgaactaatgctcacacgctgttcctcggacccaaactccgtccaaacagtagaaactgtaattagtacatttccagaggtgccagatgagtgcattaagagcgtgccctctgacctctgtggttgcttttattatgcaggattatcaagaggaaattgctgttgcccaagagaacaaaatccagcttcaggaaatgggagaacggcttgctaaagccagccacgagagcaaagcctctgagattcagtacaagctcagcagagtgaaggacaggtggcagcatctcctggacctcattgcagctaggtaagaggcaagtgggggagatggtactgtatgcttgtttttgtttttgtttttttagttagtttgtttgtttatttttacatcctaaccattgccacccagtccttcacagagtccctcccctccatcactctccccttttcctctaagagggcgtccccccacccccggacatcccccccaccctggcacatcaagtctctacagggttaggtacatcctcttcctctgatgttataggtttgcatagttgggtgtgagagggagactgactgttgttgctctgttcattcacaaaaataacctacttcatcaccagaacttcctgctcaaccataatggtgactgtaattgcacctcatgttggagaggcagactacgttccgtttattttgtagacaggctttgcgaataaaagggatggtagccaacaagggaaaacatgagggcctgtaccgacagctcaaatgccggtatgacttaacggtgcatgcggttattttatattaaaagaggaacagaccttggagtaggtactccttccttcaggtcagggtgtagatactaagaggcaatgtctgtttattccttgtctatcaaaaccctgagaacagtagctgggcggggctgtggttcagtggtagatggattgagtagtctgtacagatcccttggtttgtaaagtaactggagagtcacaaagactggtgggaccagaaaatgaatggctgcaggttgggcctcctccccagagtatgtggtggccatgcatacagggaaagaaattgggcaaataacagtgcactccctgctcagggacatactagaagggaaatgcacctctcccctggatttatcctacagctgaaatgcgcagtggttcagaatcccaatatggtgtttagtctcgaatctcagtcaccaagatgttaacaagatcttatttccgaagcagaaattaaaacctcatgtgctataaaggcccttccagagagacctcccactgggtcaccaccctggggatttctgcaagtatgtgtcagattctgactcattgatgtgcatgtccatataattccattaaactggttaaggttcccttgtgaatctcagtgttgcagtgatacagagagggaagaagcactatacccaaaatattttaaatcggctttcacactgcagttacaggcagctggcttagcttctgctcagctgccagctaacattacacagagagtgacactgtccctcaaagtcctgtctatttacaacacattttatgatttttattcagggaagagttttctagatattgtctttatttttttaaactatcccaaaagatatataaacaaacttgagtcagctagctgtatgtcagtaaggcacgggtgctttacactgtagtctctaaagtgttcctctgtgcccaccactgaaaatctcatcatgtcaatgaatccagtggaaaacttttgtatagatgaagtgtccgtttctgagtcccgcctttagaattagagcagatcataggtctattgtccgcttgctctggacatgaagagcaagtgtgagaccacgctggatttactccctctcaagctgcttggctatcacatttgctttctgctccttgtttactgcgctcgggctagatgaacttcctccacacctgtcttcagctacaactgccagcggtattcatttttgtccttcagtcccgttcatggctctgcccctttccagcaaaaatgttgattcaccaaatagagcagaacttggttcatattttaagaatttttaaaatcaattctatatttttttacttatatattttgggtagcgtggatgcaggggaatgccacaacatacatgtcaaactcagagaagcacttacaagagtgagttctcttctttcagaaatggaactcagaccgtcaaagggatggtagctggcctcacctgctaaaccatctcactggcctagactgtttcttttttctttctgagacagggactcatttagtccaggctacctttgaatcccatatgtcatcaagagtgatcttgaacttctgatcctcctgcctccaccttcctcagtgctgagatgatagacacataaccacatgttctatttatgcactgctgagaaccaaactcaaggttttacatacactaagaaagtactctgccaaccaagctatgtcgccagcctttgtatagttttcatatctgttgctatatgtttttgcaaaaaaaattttgaaacttccccaaattcacagaataaaattttctgaaatcctgtcaaacaaagcaacttaaaaaaatgtcttgaaataatgttatttttgactacctctcatcattatttttaaatggacaaaggacaaaggtcctataagtggaggtgaatatttcttcattgtttcccatgttcaaatagtctgttacaaaggggatgtcagatgattttccacagagtatccagcccttctcccccagcaaccccttaacctcctcttactcataccactgtgctggccgactgaccgggagagaggaagaatctgtttctgtttgctgctgcgatctgcagtgtttgtatctgcttctgtttgctgctgcgatctgcagtgtttgtatctccttctgtttgctgctgcgatctgcagtgtttgtatctgcttctgtttgctgctgcaatctgctgtgtttgtgggagttgtgctggtacttttgcacacaactgctttgtcttttccaaggagcactgctgttgtagccagcagcacacagaaaaaagctgagcgtctgtgcctgcagccgtggctgtctcaggaaccctttcttttgagccgtaacctgctcttgctggcagattacccttcttaccctcgtggcctacattccaggagatcaagcctggcacatgctcatgagtgtgggttttatttagaagcatgaccacttgtgactgcccagtgtcatgttaacagacagacaaccagcaccatttgtccaccaagagcattttcatacttctggcctagataaggggagagactctctcctcatccaggaaggactgagcctttcgctctgcagagccggacttctacaagtgacagcttcatggtggtggcagaggacttgcatggcccgaggatggcagaggacagcagtgtggatgcagatctcccagactgcgactgcgatgtctccaggcaggcatcttcttgattgggcatagctttagagttacgtggggctcacgggatagacactaggctcttccatctggagtgtttcgtgctgactttaaatagacgtgagtagcacgaggagaatgtaggccatggactccaaagggttctttgttggtttgttttcttgtttccttactgggcatgtacaggaggttagtatttccgttgtgtctgggccaaatgcatcatgcaaggaacatggctccagttgagaagccgagacaggaagattgagaaaaagattcagcaaagccaccacctgctagcgaaagggtggcttcagactaaactgaaagtgggccggagcctgtttacaactttgcagcggaaagctttctctagagtaaataaaagtctgtttcaggcatgtggaggaggattttcttctgagagaaaaattgcttttgtttgtgttggtcagcccctttgggcggtttaggccttcaagtcttataaaatatgcagatactataatttaggtctaaaaaatattagttacatggcttagtgtaaatattgagtttgtgattgaattcatatagagtaacaataacaccgttgatggtctgtggtgaggattcacggttcttcccatatgatagggatttttatcttaaggttctgaaatgtttttcatgtattgtcatgcccttgtgtggattcacataggtgggttgtatttactaatagcaattttgtttcaactatatttatactctgaactctatttggttttggtttgtggatatactaattatttgaaggaatgcatatgtgtatgtgtgtgtgtgtgtgtatgcgcatatgtgtatatatcagatattagatatattaatataagtatatttgcaattacacatatgtatgtgctcatttgtgtggtatcagtaatgggatgggtagttggattcagtagtatggctcttctcaagaagtttaagagcctgggacatgctttgggtgaaaaggacacgcataagctatgagggcttgctgattaatcatgcttgttaaaccctgcacatgtgtatcagatgttggcatctatgttaaattaaaaacctggatgctatcccagggaatgccacccaagttgcttagtttcacatgataaataaataagtaaatattctaatacatgaaagaattctttcaaaggggtaatggaggaaaaatgagatatttcttctgcgcaagaatgacacctgaaaataccagagttaataagctattacagataaacatgggttttcagcccacttcctccatgctcgcctctgctctccccaccaacatacacatgatgtattatgcaatttgtaagaaaatatacttttcctgaaatttataaaggacaaccacttaagcactcacccattgactttactaaatttatattagcctgaaagaggaagttgtccataatggagtatatgaatgagcatttccgtgtcacaatgccctctgctcattgtacactaaccacactgccttggacctcattcagtgttttacaggatctgagtccttccactaattctgctggcctggtagagtatgatttactcacatctttttgtgctctgaagcatttgattgcatctgtgaacacacatggatgtgctcctttgtgtggtagtatccgtgtgaatggacagttggatccaatggattcagcgacgccaaagctggtcacatgagagggaagggacaacattcttcctgggtccctccaggacagacttcttggtgcctgcagcgcatcattcttcagccctgcccaagtgggactgctggtaatctaaggcattatggtaaattcgaagtccattctgtggccactcactgcgtttcctgagacctgcagcagcagccatcacaaagctgtcattcattaattacccaggggaattttgtcttatgaatgacagacacatgcagggatgacttttcaaagttcttggaaacattcaaacacagtaccatgaaatgcacaaggtccaagcttgacttctgcctataaaactaactaaggaattcttttttttccatattttttattgggtatttatttcaattacatttccaatgctatcccaaaagtcccccacacgctcccccacccactcccctacccactcactcccacttcttggccctggcattcccctgtactgaggcatataaagtttgcacaaccaatgggcctctcttttcactgatggccgactaggccatcttctgatacatatgcagctagagacatggcttcggggggtactggttagttcatattgttgttccacctatagggttgcagttccctttagttccttgggtactttctctagctcctccattgggggccctgtgatccatccagtagctgactgtgagcatccacttctgtgtttgccaggccccagcatagtctcacaagagacagccatatctgtgtccttttagcaaaatcttgctagtgtatgcaatggtgtcagtgtttggaagtatattgagtaaaattataagttgtggtaagcagtgtgtaacacattgttattctttatcaactggccaatataaacatagatttttcttaagtatacatttccctcccaaattttctaatatacctcacccgagagtgcatttaaaaaagaaaatgttattgtgtaataggtattacaaccaaatacttgtcacacacacatatggaagcaaacatggagaactggccatctttttaaaaaaatactaataattattttgcttttttaaaaaattaaaacataattacatcatttcccccctttcctctctctaatcccctcacatgcatttcccttgctgtgcctcaaattcatctttttaattgttcacacacacacacacacacacacacacacacacgcacacacacacacatatcttcctaaatataaatacagcctgctcaatcaatgtactattatgtgtatgtatatgatttcagggctaactactcaataatgaataaccaactgaggttagggttcatccttaaacaagacccaaacaagaatgataccaatggacatgctagcatggaaaagggaaaatttcatggcatcctagctctagacaaaaaaactacagtcagctaaggaatgcccagagcaggatggaagtcctttaaagaacacgtgtgtgaggatgagatttggggatagtccctaggggaagatgcaactataccatcaggattggtttcattggaggcaagcactctgatttgttgacactgtgatggtagaaatgaggttgtccatcaattttaaggaactaaaaataaatcgatattctaaaaattcttgaatgaagaaattttccctcagagcggtgacttttggcctgaaaaacagagccgaacttctgaggtgggcgtggaaggaaccgagagctgtagctcataggctgaaagcgccttgggggtgagtctatacttcacccagagagcaacttattcagcatctcggcgtcatagagatgggccatccaagtataagctgtgaatcacagaacattctattgaagatctgctttgaaatttctagcatcccgtaggcttagacatcatgtggctcttgacattttttttttcaagaagatacattttcagtgaggccactttgacattgaagcacttttctttatctggttatctgattacttataggaagagcagttcctgtaaattctccatgtttcctggaccaggacgtagtctatgcagagaactgaactttatttaaaaaaaaaaaaaaaaaaaaaaaaaaagctgtggcagaaatccctggttgtgcactgctttggggagtcatctatgttcagtcaaacaggccagaccctagacagggacaggaacagctaatcaatccttattatgtgataaatatgaagtcaaaacagtctctttccagggctgtctcaacagatgcccttggcatctccctctccatccttgctttgatatttatctgcatttgtacgttcctctcccttttcctctgtgtcagattcttcctctacatctaagtacatcatatggttgtttcccatgatgaactatgtttggttacatgttttttaatagattattctagaagttccatggcttatgtcttcatcctttgtaactacttctttcaagtaattaattaccaggactataaagagatggctccagggtcggaggattgtagtgtggttgtttgttactttacagctaatatccacttataagtgagaacgtaccatgtttgtttttctgggtctgggttacctcacttaggatgatttttttttttctagttccatccattggcctgcaaatttcatgacacttttttggcagcttagtaatattccactaagtaaatatactgccctttctttacccattcttcagtggagggacatctaggttgtctccagtttctgactattattgataaagctgctctgaacatagttaagcaagtgtctttgaggcaattgtggagcctgtttgagctaggtgctctgcatgtatgttatggtagtcaggcttgttgttcttgtgccatgccttacagtgggagtggaggctggctctgactatttgcttttgggatctttttatcctcctatttgactcttccagccttgacatgtgtttgtgcatagtcttcttataacttttgatgctgtgtttggttcatagccctgggaggcctactcttttctgaagggaaatgaagaaaaggtggatctgggagagaggggaattgctggaacaccactttgggtgcctgttgtagggttaatggggtcccatgtctgcttggccacagggctcagccgcttggggaggcagatctcagggagtttgactccgcttaccccatgctgtcacttggcagatgttaggctgtagggcatccctgggacaccgctcaggggtggggaagcacagtctgaggtgcaggactgctggagctggttcaggggtcccctggcctgtgacaatgatgaggctcagggctgtctcgttctcaggttttcgaacacccaggctcctctgggagctgaaaatagagtggaggccagcaggctggatctggcttagcttggtggccgtgactgggagcacagagaggccctctaagggagattacatgggagctctgtaggcgaagcccttctccatggctccccatggtggatccctgtgaaatgaggcagtgcctggctttaaggcatttattgtcatggcagaaagtagatgagttaaaaccgtaccccacttctcatggtgggcctgaggttaaatatcttttgtagggaagaatgtctgggaaggagagtatattggctaagtcctctaagcctttagggaccccataaaaatggagatgtgtcttgagcctacatgaccacaggtcacaacctctacctgtggaggggcttcgggaattgcccttacttgactgatagtcagaagtctatggagggctgtggctagtgacaggggcctggtgccctagaatcaggcgaaatgcttatcatcccttcagggtcatcagagtttcaagccttagctcaactggggaccacaccacctttcatggtgggtgggagaactggaggcatggggggaggggaaactgttgtcaggagataatgtatgagagagagggagagagagagagagagagagagagagagagagagagagagagagagagagattgagataggactatctcagttgttaagaacatttttggctcttccaacagacctgggcttgattctcagcacccacatagggcagatctcaaccaactataactcttttttttgggggggggcagtgtttcaagacagggtttctctgtatagccctggctgtcctggaactcactttgtagaccaggctgaccttgaactcagaaatccgcctgcctctgcctcccaagtgctgggattaaaggcgtgtgccaccacacccgccaccatgcccagcatataactcttccatgcatatagtgaacagaaactcacatcggcacaagcatcaacaaaataaaccccctctaccacaatcaattacagctccttgccctaagcattctgggtagcctggctgatcattttgtaatgagtaatggcatgctcacacagggcctgcagagcccttctgactgttaacatcagatcctctctttggtttttttcagattgtttacaatgctctatagcacaacagtagttcccaaatgtcagcctttgtaagaaccaaccacatttgtgtaaaattctagttctgtagccttacccctgggatgagtccctgttcagactgactgattctcatttttgagcatcctatctctggtctacattatactttcctggtcttccaccttcttaaaaaaaaaaaaaaggtgtgtacgcatgtacgtgtgtgtgtgtgtgtgtgtgtgtgtgtgtgtgtgtgtgtgtgtgtgtgtgtctctccagagaactctgtgtaacactgggatttacaggtacaagttagcccacctggcttttcctagtttctaaggatcagaactcaggtcacttgattgactgagccatctccccactccctgttttaatttctgattttttctttagtcctcctttaagaaactttaaaaaaaattcttccttctcagtcaacacccctgcacaacttccattctattcctaccaatttaatcaatgctataatctcctccctcacctgtagaccttagaactacatttctgtatgtttctcgtagcacctcaagtgcccagccagactgtctctactgagtattgcacctcctgtgatataaattgtaatatttgtgggaccgagttctctgagagctgtggagttgctgtaatacttacagaattgggtataatagttgtgaatagttgctaaatgttctccttccgtgagcactttattacccctcttatttaaacattatcaatccttgcatagtctataagatccccttttgtataatgaagaaaccagacacacagcagagtcacactgtcaggatggatcagctcaatttggccatggaccacagcactggcttctccacatgagggtaacatgatcaaagcctttcaccatctcaccaattctctgtccacagggtgaagaagctaaaggagacgctggttgctgtgcagcagctggacaagaacatgggcagcctgaggacttggctggcccacatggagtcagagttggccaagcccatagtctatgattcttgtaactctgaagaaatacagaggaaactgaatgagcagcaggtaggtgggaaaagagattgctaagccacacatcctgtgttctcttggccaggataatttggtagtcatcaagatgctggcttgggatgaaagatcacaaagaagttaggcaggactagtgacagtggggagctctgtgtaggaaagtggtggggacaaataggttctgtgtcaccgcagaattgactcttaaaagatggctgtgccatatgaatgtcttcacttctccaagaagccatctaacagccatcagccgattgcttctttttctgtgagcccaccactgtagacttagaaagaagcccttggctttctgtagggtgttcagagaaagactacgatgtcacttgaggccttttagaactgaaacagttctaccctgtgaggaggacagtgtgatctccagaccacacagtcactccagcttcgtggatccagttagggcagcccatgcccccgacatagaatgcaaagcaagggaagatgcgcctgagaatgagagcagagaggaatttttatttcctacccaccttgtttattcttacaaagtgtatcagactccagatgccagccatgaaagtgttaccgtatgtcttcattgtcactgggaattctacacaccatggtagccaagttgtttgccttaaaataaatgaaaaaagaaaatacttttcaaatcctgtaagataattaacacacttcttttttttttttttttttgtaaggaatgaatgaggtcaataatagcaatggctgacaaacctcactgatgttttgttataggccggaaactgttctaagccttttgtatgattttaaaattatttttattttttgaaattataattacagcattaccctctcccctttcctccctccaaaccttcccaaacacctctccttgctctcttagcctcttgtttttattaactgtttatatatatataactcacacacacaatatatatattatatatgttgtgtgtgtgtgtgtgtgaataaggttttttaaaaaacactcacagaaatgtgtgtttgtaaatatagcctgctctgtctgtgtgatataacttgactgtatatgttttaggggctggccacttggtattgggtatgcaatcagtgagcctttccccaaagaggaagctccctcccactctcagtatctcagttgcctatagttctttgtgtaggactgaggcccctggttctttcctagttccctttatcatatctagtatggctctctgtgtttgccccatgtctctgcagacatgttggggagaacgtatgggtgtagcttctgacgtgcctaggagacaacaatctcacagtaaactctctgatcctctggctcttacagtctttccacctaactcttttgaagtgatccctgggttataggtgtaggagtggctttgtagatgtagttagggctgggctcttgatctctgtgttagatacacatacttaatttttacaacactgtatactagttagaatagatatttaagtacagctatagatatggagtttgccttttattttgttgttctttcacaatcttatacacgtatgaactgactcttggtgttgtttcatactcaaattatcattgccttaagaccattttgctgagacatttttagtttttataagattagtgtcctctgtgggccgtgtttgacattttggggattgcattgaaagggtcattgctggctttcagtgccccccactcccacccaacttctccaggagagcctggtaaggcatgtaccaggtaaaggataatgaccagtgttgtccacccattcttaactctatgcctgcaggcaggagtctccagcatttaagaaaccctcttccatgagggggagggccaaagctaatagggtaaataaaggctacaggaaagagcacacacacacacacacacacacacacacacacacacacacgtgaatatgtatgaatatgagatgactatgaatgtatgaatatgagggcgtgagatcccctttaccaggataggctcccagggatgtaacttcttcagcagggccccacctactagaggtcctgctgccactcacaccctggaaggtgggtaaccaagcctttgacatgtgggtctttgaagaaccttctagaaccaaattgcagtgaagcccaagggggagaataatggacattttcgatttacattctctgcatttaacctgagttcatatgttggagttggatgaaatccagtttcctgcttatctcaaacactttctatttctgtcctacacttaaaactgtgctccaaggggagtagtgatgacctcatttatggaagggagcctcagtgttttaagccacagaacctcttgatattgtcctatgcacttgcagatctgtgacacttaaatgtcagttctgaggtgggcgatactcttagatgcatgcatactgaattgattaatcaattggaatgagagtgatatatcagtagagcccagggcaagaaattctattctctctgtccctccctccctccttcccttccttcctccctccctctccctctctctccctctctttccccccttcttgtcctctctccctcttcctttccacggcccctgtgtgtgtgtgtgtgtgtgtgtgtgtgtgtgtgtgtgtctgtgtgtgtgtgtgtgtgtctgtgtctgtgtctgtgtctgtgtctgtgtctgtgtctgtgtctgtgtctgtgtctgtgtctgtgtctgtgtctgtgtctgtgtctgtgtctgtgtctttacacccaggcaagtgtgagccacagcatacagggttggtctttacctcctaccttatttgacacagggcctcttgttgcatactacagtgtacaccaggttagccagaacacaggcttctggggatgctcctgtttctgcctcccatcttgtcttagctctggaatgataggtgcatgctacctgtaacatctggctttacatggttctgcacattcaaatcaggttagcacattagtgtggcaggcactttcccgttgagccatccccacaacccaacccaggacttattttatcacccattactaaagccagtttgactctttgtgtgtgtgtgtgtgtgtgtgtgtgtgtgtgtgtgtgtgtgtctacacatgacagaggtcagacaggagcattgggtcccttgaagctaaagtttctgtgagccttccaatgtaggtaatggggcctgaactctggctcaggaaacttgttcatccaggaaagtgaaccactgtccagtatggcatatcagtccgtgagcgtgggcggagttctctcatctaaatacacagattctcacagcaaagcacactctaatgccctgcaggagctccagagagacatcgagaaacacagcacaggtgtcgcctccgtcctcaacctgtgtgaggttctgctgcatgactgcgacgcctgtgccaccgacgcagagtgtgactccatccagcaggccactcgcaacctggaccggcggtggaggaacatctgcgccatgtccatggagaggagactcaagtgagctgggatgggaagctacagaccaaaccaaaacaacgacaaaacaaacaaaaaccccaaaccacagaagctccagccagcttcccagtcactgtatccactgtttacacttttccattggttacaacgtccaaaaatagccttgacttcctgcagatgactactacctacatataactgcaaatataaataggcataaatgtaatataagtgtaacaagcaagcttatattggaacacacagcttaaatattacatagaaaaattaaaatcttcccttgcaaagtaagtatagctttattgaatttgttgtcagagatagataacattttaaatcaaattctactcttcatggcgttaattgaaataatccacgctcaaaagagataaatgttgcctctgggtctagatttaaatgtatagataacacatataaatctagacttaaatgtatatttaatacaagtgtttaaacatagaacataaaagtcacaagggcactaagagaggaggaagagttctagaagaaagggatggggaggggggagaagaaagaggaaagggagaaggggggtagggagcaggaaggggaggaagtatgtaggagagaaaggggacagtaggagtaggagggaacatgggagggcgggccgtgggggaacaaataggaagcacaggcacaaagaggaacattgcattgagacctctcgctttctgtactatatttgtaaagtaatagacacttttaagccttgctaaaatgccagtggcaaaatctcaatgtcctgcatctcagtgacccaaagtacaaaactatgctgacccctggccagtcctaaaagctccacacttggctggcaaggttgactgttattactcggagtctgatgttggcattaaaggaaatctccaacttcacatttatttaatgcactggcctgaacatggtgtctacctgtagggttcctggcctcccatgcgagcaccagggctgctcatgtatgctttttaatatccagtttgactaattccaaattcaaagctgcagggcatcttttgaaaccaacagctgtttgatttttagctcccacagttgtctctttccctgggcggtttgggtcaaagctgttattgttttgcacagcagttgcttgtctgggcactcttaatcccattgagggcatcagatagggttctgaacattaacagtcttaataatgaggggtgtgttctttcatcttctgcctcagaattgaagagacgtggcgactgtggcagaagtttctggatgactattctcgctttgaagactggctggaggtttcagaaaggacggctgctttccccagttcttccggggtgctctatacagttgccaaggaggagctgaagaagtttgaggtgattcatactgccaaatagtcagctgttcattgtgctgggatacattgtgccagctgggagctgatgccacagagcaggaactgactaacgtaccatgcgttatctattcgaatagctgcggaatgactttgtagccatgggcagcatgcctcgagagtagatgaagagcagtgacgattttaattgaagattagcagaattacaaataagaaagtaataaataaaaatgttagccagacacagtatcagactctcatagtcccagcactcaagaggttggggaaggagaatctcaaattgaagtctatcctgggctacagagtaataaggaaatatagcaaagaaagaggagagaggaaggggaaatagttctcttggaaaacaagattcataattctcttcaaaccctatggcattatccttatttcagaattcttcatctatgacttctaagattaaaatatgattatttctataatataaaaatctacccgtaaatatattctctcagtcctttcaacctagctggagtatgtatagatacacattatgggaagaccagaaagagtcaggcagggccagtggggactagaagcaatgagagagaagcgtgttgtaatgtaggggcagaaatgtcccctgtatgctagctcagagaattaaataatcaaatacataggagtgatgttgataactgatagcatgcagttgcatacagttggccccagaattggccagagcattgtggttgtagcccacttctaatagagcagaagagtccaatactgttcttgagtcacaaagaatttcagattaccaagagatgaaaatagcaacagttaactggaaggagtcattaaagcaccctattaaaggctccttggcttcacaatctcaagtccactctatagctctgtgacaacctgaaccccaaccattgcgctaactgattacacatagacattggtgtagatagaacacatcactctatacacacactgacactcacatgtgtgcctgtgcactcactgtgaagggttctgacatgttctaaatagtcctcactggtgccccattggtaatttttcctcagtcctcctcaagatgtatataaatgaaactagcatttcaactaaatccataaatgacttgattttctcccatgacatcagtgaaccaagccttgagctagtggagggaaaatgaaatttcttctcattcttgtctgatttatagatctgaatccttgatagataactctctgagtataatagtgtttgatgctatatggaataagtaaaagcatatgaaactaaaccaataagtacagagagagaaaatgcctctgtaaaaagttttctctaggtgactggagagattgctcggtggttaagggctcttctagaggtcctgagttcaattcccagcaaccacatggttggctcacagccatctgtaatgagatctgatgcccttttttggtatgtctgaagacaactactcatcacgtataataaataaataaataaataaataaataaataaaaatttttaaaaattttttctctagcaaaaagccaccataaactgctgaagaatccagatcacttcacaatgctggtggaagtgaccctgccctgtgtcttgtagcactgtgctttgtgaaggttaaaacctctcataattggctaacactgcaaagcagattacatgggatcattcttgattctattttggactcagatgcccagcactgaaataattgatttttttaaatcaagtatcattattcttatatttaattttcttgcagacagaaaatgtcacagatacaaaattctgcttaaggatcactcactcacttgcagaaatgtttggaaagacattgggtgcactggggtgccctgagtgctatacaatcacctgagcgggcagatctatgctctgacatattataacatcaaaagtagaacctccttgagcacctcataatttctttaaaacttaagatagcctgctgggatgggtgttctgaaagcagttctcagaaggcaaatcatctctagggcaggggttcaatcctctgagcagtgtgaggaggcaaccaacacggaagtgtgagatgcacataaaatcaacgccagtaagccactcatagcatttgggttggggtctaggataaaagtcagccacaaagcagggtgcatgcatttagagtgaagctgtattttatttgtgtgggtgtttggttggttagtgctgggccctgcagcaggggtagaaggaagtgctagtaaccatacaatttctgctccctgtcatgtcctcaagagcagagcatccatgctctatgctaggataacaactctggcgtcttttatgaaagctgagaagaaaggaccttcttcaaactgctgtgtcttttttttttttaatggaaagttagttgtgttttatactaacctgattttcttaaaagcagggttaacagctggcattagaggcacttctgccaaagatggttttagtttcgttcctaatggacaccaggattgaggggatttctgcactttgaagaaattacatattctacaaatgcacagtgccattttacatatcatttctcagtacggacacagaaatctcgagaacacttcaatctaacgtgtaaacacccgtatgtgttcttgcagtaatttcttagataggaaaattggtttcctggttattatttattttatatgtttctttttgtttttcaagacagggattcatatagcccagggtaaaatggattttaataaacttgatcaattatttatatgatttggccagcccccctgaaaattgagtcaaaatcctatggttttatttatttagctttgcgcagttactggaggatgtcgcctaatctagttttctaatgactaaactggctacttccccaactctgctccccaaatacttgctgtttgagtctttccagttatttctgctccagcagtctattctgggggacacatgctgctggtccagtgtacatggcaattcactcttactgagtggggcagccagatgtcggagtacagaatttagtatttgaatacctagcagcaccagaccacccccacccccaccccccagcctggctctcagtccctggatgaccttgaacttgtgattctgatgctgctgcttcccaagcactgaaattgcaaatttgtgccaccgtacttggcttgatttcattagtcatttttaaaatgcatgcaacattctatatgtgatgtttttgtgtacatgccaatatacaaatatatatatgtgtatattttgcttttctgtgtacttgttgataaatacaatcatcccttacagttctgttgtttcttgtggctcttggtcgatctgctgggtctgagatagggtaacttctgtgctccttgactctgcagtatgaaaaccaagagacataaccctctgagttatgtccttgaaggatctcccacattaattaacttccctgtggcttcaggctttccagcggcaggtccatgagagcctgacccaactagagcttatcaacaaacagtaccggcgcctggccagagagaatcgcacagactccgcctgcagcctcaggcagatggtccatgggggcaaccagagatgggacgacctacagaagcgggtcacctccatcttgcgcaggctcaaggttctcattaagtcttgtctcataatatggggactagaggataagcgtgactagtgagacttgttcttggggagagtggaagttggaagggcaggaggggatggaagggcaagtgataggaagagagtttagggtgctccatgcttgtgaggaattgacttcccagaaggctggaactggctgggccatatcagtgtgtgactgtggacattttagtgcctaatatcctcctcttccttccagcacttcattagccagcgtgaggagttcgagactgcccgggacagcattcttgtctggctcacagagatggatctgcagctcaccaatattgaacacttttcggaatgtgacgttcaagctaaaataaagcaactcaaggtaatgagtcagttattctgcaaattatcaatgtggaagaatgctgaaaaggggagggtttgcaaatcgctttctggagaattgagtatagagcctttgaaaacttagttcttcatgaacaggagatgttaaaacatatggaatttgaggaagttttttgttctgttttgtttttaatttttgagacagggtttctctatgtagccctggctgtctgggaactcactctgtaggccacgctggccttgaacttggagatctgcctgcctcttcctcctaagtgctgggattaaaggtatgagctactataccaggcaatgttgaaatcttttaaaattgctctaatgcacccattaacataaatactttaaaaatatcaacttggttgtcagtgttggggatttttgatgtcgttgttgtttaatatattacttatttccaaaatctatatagaatttgatggctccagtttccagaaaaaaaaaaagtccaacttttcatcagctttcatctgattattgcatgtgtgtagcaggggccagggcagtccttgtgccactgtgttcacagaggtggccgttttgcagttggttctttccttccatgacgtgggttcaggaactgagctcccatctgacctcacacttgggggcaagcacctttgcctgttgagccattttgctgacttagaatgctatgttctcattgggggattttattccacatagtttatgtttctggaggctaagttaatcttaaatgcatgctttatcattcactacttaattcagacactgtgctagctagagaccttcattgaagagatgtgcattaaaaagggagtagtgagctcaatcatttttgaggcagtttctgacattttatggtgcttcaagcaccataaaaaaatagatggtaagatgctacacttctgtaagcccagcacttggggcttagaggcagagagaccaggagctcaagatcatagttgtctatttatcaagtttgagattggcctatgctacgtgagaccctgtctcaaaaaaacaataaaattgtttggttgtttgtttaattatttgtttatttatgtgctggcgctgagaatcatacccaggatattgtacacaggaagtataaattataccacttaatcacctcccataatactccactgttgaggtttttgtttggttgtatgtttgcttgtttcttttttaggaatagttataatgcctgtgatagtttggataagactgctcccctccataggctcacatatttgaatacttcaccaggaagcaaaactgaaaggactagagggatgaggaggtgtggccttgttggagaaaatgtgtcactgtgggtgggctttgagcttttaaaagcctacatcaaacacaggctttctctctctctctctctctctctctctctcttttttttaaattaggtattttcctcatttacatttccaatgctatcccaaaagtcccccatacccatccccccactcctctacccacccactccccctttttggccctagggttcccctgtactggggcatataaagtttgcaagtccaatgggcctctctttccagtgatggctgactaggccatcttttgatacatatgcagctagagtcaagagctccagggtactggttagttcatattgttgttccacctatagggctgcagttccctttagttccttgggtgctttctctagctcctccattgggggccctgtgatccattcaatagctgactgtgagcatccacttctgtgtttgctaggccccggcatagtctcacaagagacagctatatctgggtcctttcagcaaaatcttgctagtgtatgcaatggtgtcagcgtttggaagctgatcataagatggatccctggatatggcaatcactagatggtccatccttttatcacagctccaaattttgtctctgtaactccttccatgggtgttttgtttccaattctaagaaggggcaaagtgtccacactttggtcttcgttcttcttgagtttcatgcggttagcaaattgtatcttatatcttgggtatcctaagtttctgggctaatatccacttatcagtgagtacatattgtgtgagttcctttgtgattgggttacctcactcaggatgatgccctccaggtccatccatttgcctaggaatttcataaattcatttttttaaatagctgagtagtactcccttgtgtaaatgtaccacattttctgtatccattccattgaggggcatctggctttctctcttaacctgcagatcagagtacatagctcttagctactgctcgagccccatatgtgttaaccacactcctagccataatgacaactgactaagcttaaaactgtaaacaaacacccagttaaatgcttgattttataagaattaccttggtcatggcttctctccacagcaccagaacagtacctaagacaatgcccaaaactttggattttatgatgaaacaaaagaaattacccttagtagtaccttgttaaggtgtaataaactgcacacaatgttctgctcaatgttttgccctgccccccccccacacacatacaactgtctcacttcataccagaagcaagtcaatatttgaacactaacaagacatttctaccaactgatatttggaacttttccttttaggttctggaaaaatcttaaaggcattactatcctccattgtccttagtctttcttattagtggacaatttaaactcttccagggcttatttttggactaaatgaacatctgtcacttgaaacttgtgcccatatctgtctttgaaatcatatagactcttgtagaataatctttcccagatcccgtcttttcaaatcagtatacctttatgcactgattcttagcttccaaatcaacgaaagaatcaaagggacctgtgacgccccctttagtgtacgtgtggcataggatatatattatgtggaataaagcaacatgctcacaccacaccatcatttttaccaggagtcagcagcactattaacaccatgatagttgtcgatatttatctgttattctccgcctgcattgtggtaatacatttttattaccataggctcttttctgatatctgactcccattctgtcttaaggtgatattttactttagaaaataactgctccatctttgtatatagtaagtcatcatcccccctcatgtcattccccccccccaatatcatctttctgacactgagagaaatgcataccttactagacatcattttgagatgtgtaaaatccacattgtctttgcaccctcaggctttccaacaggagatctcactgaaccacaataaaatcgagcagatcattgcccagggggagcagctgatagagaagagcgagccactggatgccgctgtcatcgaggaggaactggacgagctcagacgctactgccaggaggtctttggacgtgtggaaagatatcacaagaaactgatccgcctgcctgtaagaggcacttgtttctttctcattgaatccacagagaattagctgtatgggattagtcatgatcaagtccagagtctagaagaagaatgcctggatttgttctaagcctcgatactgtcatctatataacttttgacacgttgccttacctccctcacctcagtttccctaactttaaaatggatttattcatagtcaccactttgtagggagagctgttttgttcatttgctgagtgaccatgtatttgtataacaacttaggcagactgtgtgccattgttcttctacaggagatggggtatctttgagaagagatgagatgcagtaagatgagcaatggctcagctcgtgagattatttttgaatgaattgctcccttccgttttcttttctacccgcccctacaatttcatctcatcaacagtgaatgatgctgttaatccaaagacatggaaatgtcctgtgattataaacatgcttcatgtctagcatgtagaatccaaaggatgatatgccattgtgtgccggttgagttggagacatgctacttggtccattatttatatatttttttatatttttaatattttaatactattaatactttttaatttcctataatggccccttggaataggttttaatatattcccactttctctgtgataaaactgacactgaaacagatgagtatatgaggtattttgaaagtaatcaggaagctctcctgtatctgttgataaagttaactccatatcgtcagcaggacctgctggcattcatttattgaaggtctcacctgtttggagtaagaagtggatcctattcttgcagtgacagagttgtgacttcccttttagctgccagatgaccatgacctctcagaccgagaactagatctcgaagactccacggctctttcagacctccgctggcaggacccgtctgcagatggcatgccctccccacagccttcttccaacccctccctctcccttcctcagcccctccggagtgagcggtcagggcgagatacgccggccagcgtggactccatccccctggaatgggaccacgattacgacctcagtcgagacctagagtcagcatcccgaactctgccctcagaagatgaagaaggcgaggaagacaaggagttctacctcaggggagctgttggcttgtcaggtaggagagaaaacttcctgttgggaatccatatgagggacacatcagctatctggactcatctaccctgaaaggtataagcactctctatatacatggtcacacagggacatcatagagtgtcagtcccagggctgggtagaaacctttgtgtgagactagtaggataatgatgagtccctgaggtgaaaaatagcagtgggctgaggaaggaggagagagaagagccttgccaggtgatcaaccttggtgctttgggtcatctgaagtttgtcaagaatagaattgtgctggatggcatagagtaggctcaatggaagatgggaaagtgaataaggggctggccctgaaatgaccagttcaccatggagaggagtttgccccttaccctgaagtgcatagggatccactggaagattaaaggagagatgtaaccaaatttgtatattttcggtctaactgtgtgtgctctccatgcatggtggaacacaaattggaaacgagcattcagacaagtgttatttatgagcatagataatgacctgaattagggaaacagcaccaagaaggggtgatacatcgtgagaaatgaatcctctccattatcagatgattgggaagagatggaggtgactcaggattaggcatctaagtggaagatgaaagtggtcctgggctcagaggacacgtggtgtgggtggatgagagagttgagttgtgaaggtacagatgttagttgcatccatccccattttgagatatttacagaactcccagagcctacagtttagagacagatgcatgggtctaggtgtttatctgcagatgcatattaggtagggattcgtctgtgtgtaattaggaattctgagagtgcaggggggaaatcatacagctaaagcatcctgaaaggaacaggaagaagaacaaagcagcatcacatttagtgggggaagactgagaaaagaggaccttacagaaggtaaacaaaagccatgaacagtcagaggacagcatagtccatcgtgcagccctctgctagacatggccagaaagccttgaagtaagactgccctcgctgaggttgattacagacagaaaatgcacttatatgcaggggtcacttttcaagactcaaaacaaaggttgaacacaaacttagtgctatatttgacgattatatgctgctttttagaggtaaagtgatccacttgtttatgactatcctaatgtggctatcaagactttaaattctcatttatggctcacacacagatataggcaacagtgtccctctaaaagctgtctgcacagaaattcccattctaatccagatgtgatgttgttcatctgaaaccctagtactcaagaggtagagacaggaagatcaagagttcagaataattctctgccactgtattggttagttttctgttgctatgataaagcactatgaccaaaatgcaacttaagggaaaaacttgttttggcttatgtttccagagggaaaagcatagcaggaaaggcagccttgggagtaggagcaagaaactggcttgttacattgttacccatacccaggaggcagagcatgagcagaggaagtataataagctagaaacttatcaagccccgcccccagtgacatacttcctctaacaaggctccgcctcctaaaggttccgttccacagttccctgctaaagcaccatgaactgatgaccaagtgaacctggggcgggtgtttctcattacaaaccaccacagctacgtaggaagttggagacttgaagggttggctgtgctgtgagagaccttctctcaaagctaacatgccatcaacagggaatctgtcttctgccactgagtgcctttataggtttgtgtgaggaaccacattcctctagtcatttgttttcccatctataaaacggaaattatactactgggtattcttagggttcctgtgaggataaaagcactttaagcagtgactggcagacaaaacagtcagtatgaattcttagcaggatacattacatgaagcctttggcaagcatacatgctctccccttcgtgccagtgaccgtcaagaacgagtctctctttttttccctgaggcaaactactttcccaccacagggaatagaggggtccagcacttagctgtcaactcagactgtgctctttttgcagatgtagtcatccccgagaaccctgaggcctatgtaaaactcacagaaaatgcaatcagaaatacgtctggtaggcataaaaagtgggaacgcacctcctccccacacccactgtggtccaacagcccctcctcctcagcttcctcgcctctcacagctctggcatgccaaggcacagccttcttctcttcctcctgcattaggggggaaaaactgcggactgatccacaccaagagtgtgatctccatatccaggtcatgagatagtagatcctcagcttgtcaagtggtaaccagtctcgttacagagaactccatgcccagtgacagctgaagggagaggaggccaaagctcagactatgtgctctcatcttcccattggtggaaggcggtgctaacttggtcacgcagtgaccagctactggctggacaaacgatgttggctatacgctctgccgcagcccccatgcgggtgtgaacataatgcagccgataaagcatttccttttgatttcaaaagtgttgcctcctcaaatgagaaatgtccaccatgacattgtaatccttagactgccatttcagagtatgacttctgaaacccgaagcattgaaaagagaagttagttttgctcaatatcctgtactcgtttgcactagtttgtactagtttgtacatacttaagcacactgaaggcccgggtcagtggtcaggacgtgtgggagaccattgctgtttctgagtcagaatctagtttatagctgtctgtagtttctggaggccaacacaaggtcaaaaaccaagctagttttacagtgactttctcgatgatttccagctaggtagacttaggaatacattttagaaagcttaattcatttgttattttcacccaggctttgtgctactcagataatcaatgttcttggccagcaatgactacagtatacatgcaaacacataactgcaaacacatgcccacaggcataccataagtgcaaagctgttaagagagggtgagccagaacctaggcagcaaggaagaacatggctaaagaagagacagaagccaggttttgtttcatcctctacacatgcttattctgagctagtcttttcttggttaacttgaattcatgcagccagggatttaagtggtactgatgtctctgagatgcacagagacaaatctgagggtgaagccttccctgctagctaagtaagtatgggaagcacctgtctcctggtgcttggggtgtggccagtgactgcagattattgggaaagccttccactgtgtatagcactctgccttgagaatggctagagaagggagcaggaccctcagaggctgttcagaacccactgcagagctctctgcaagcccaggctgctgagtctctttaggaagcacacttactggctttaatgtctaaccctctagcaggacagcactaaacctgctttatgattccccagacacacactttctgctttgccatagctcaaatgctttatgaagcctcttgactgacaagcttgaaataagtcagacgatgtgactcttatggttggcaccacaggggatcccagctcactggagtcacagatgaggcaactggacaaagccctggatgacagccgcttccagatacagcaaaccgcaaatatcctcagaagcaaaacccccacagggccagacctggacaccagctacaagggctacgtgagtgctccagctagcatgatgcttccgacctacaggtctggccaaaacagcccatctgtctgcagcgcatgggctctgtgaggtnnnnnnnnnnnnnnnnnnnnngtgtgtgaaacaaggccatcaatctgtttgagattattttttgatggcaggccctgaggcccattgtcaccaccagcctgttacctttcactgagaacttagtatgatccacttagctgaagacaaccaaaacctttcacttccaaatgtcactaggtgcctgtccaaattcagctaataaattttggacagaggttatcactggattactaatatgagatttcattattgttgctgctttagttcttaatttatttcatgaccttaggagtgtttgtaatcttctgcttttgatttgaggatatttcacaatggtgagaactgaaccttgtatgcactaggctggcactgtgctaccaagctacttcttagccccaccttctgctctgtgggtgctgagtctgaaggaagccatcctaactagagcaggctttgggagaagatatctctaccagttctgtgatttctgttgctaatgtatccaataaaatctatacattgtagtcgccaaccaaacatttttttttttgtcagcaacctacctatatactttaagcaagagaattttaaagtaaatctctcccctagctcttgatcaaagggatggaaagctaagtcctggtggtttcatcagcgctcatgggtcctccattttggaatcagggagaaagctgttcttgttgcacattctgttaccaatacccttcgtgaaacttctttttaaagtgcagtacaaggattggagatgcagctcagtggtaaagtgtttgcctagcatgctcaaggacctgggtgcaaacttcaggactgtagaagattaaattcaagcatagcataacttcatgttgaccccattgacctcactgaggtgacgcttcacctaagtcaaaagtagcaagtgttctcactgtgagaaacattgcgagtcaagattatagtctgctgacaagaatgtgctgaaagccctgtcctgggtcagtttaccttgtattttttgctttcctttattttgagggaggttcttgtcatatagccaggctggtctccggctcatgatctttctctctccacccaccaaatgctaggatcttgctcctgcgcaaccaagcctagctacagttctgttcttttaatatttgaatactgtgtgttttactttgagttttgaacttagtcccttgatgactattaaacactgctgtacatttttctcataaaacagctggctttcatatttctcagaacccttaagtatttcagttatttaacgtaaacgttgttccaatgggatttgtggtactattagtgtttccatatttaggtttggtaaagagaaagaagaaacaatttgccaaaaattggatattgcttctccagctaaggactgtgacctttaaactgtagatcagtttgatctgttgaagattcacataaaacagaggttctcaaccttcctaatgctgcaaccctttaatacagttcttcatgttgtggtgacccccaaccataaaattattttcattgctacttcataactaattttactgctattatgaatcataatgtaaacatctgtgtcttctgatcaccttaggtgacctctgtgaaagggtcacttgaccctaatggggtcaggacacacaggcgtttcacatgcctatcatgcatacaaagtgtgtctttaagggtcttgtgagtgtgtgtgtgtgtatgtatgtgtcctgttgaaacagcatattttgatttctgcttatttttactggagcaagaccaagaagtaaaacagccactgacttgttgagggaccataaagatgctgatcctgagcacgttgtgcttgtgagggttgacatgacaggatgacagagctggcttttggtttgtctacacagatgaagctgctgggcgagtgcagtggcagcatagattccgtgaggagactggagcacaagctggcggaggaagagagctttcctggcttcgttaacctcaacagcacagagactcagacagctggtgagcactgtgccctcagctcgagggagccataaacaagacctcaaaccacactgtcacaccaggctccaccagctgcttgacctccctctacagcatgtatcccaggacagcaggagacggagagtatcctgacatgatgtgtcttctgctgctccgtttaatcaaatgccctgtctgatctacattgtcagtttctgacagatcaaggacggattgatctcttcacatgctctgcacccctcataaagcttgtcatggtgttaaatcctgagtggcaaatgtgctttccaccattgtcattggagaaagcaataggtgtaatagagccattacacccaattaacagatggcagcagaaatgatcagtgacatcactatccttttcattgccctttaaagttagccaccatatatatctaaagtgctccctaaacctcacaggtgtagaagtcctgctcactgttctgtgtgtgccctgccaggtgtaattgaccgctgggagctcctgcaggcccaggcaatgagcaaggagttgaggatgaagcagaaccttcagaagtggcagcagtttaattctgacctcaacaacatctgggcctggctaggagagacagaggaggagctggacaggctccagcacctggcgctcagcactgacatccacaccatcgagtctcacatcaaaaagctcaaggtacctacctgtctccgctttccttcctcggcagccagaagacctaggtcatgtgtaacagctaatgtgtttctttctctctgtctctccttgtctctgtatctctctgtctctgcctctgggtgtgtatgtgtttgtgagtgtgcacatgtgtacatgtgtgtagacatgtttatgtaggtgcagaagtacatatatgcacctatgcttgtgaagaccagaggacaatcttacttctgtattcatcatttggttgtagaggttttttggttggttggttctctttctttgaggcagggtctctcattggctagaatgtctacattgggtatgttggttaaccagtgagcttcagggatctctgcctgtccatcataaggattattgtaagcatactccaccatgccttggtttgtttgttttatatgtgttataggtctcaagctcagatacatttgtgtggtgaatcaatcactggcagtgccatctccctgaacagtccattcataaacttgtctctagtttttcacttcttcagggcaacagccagaaagtatctgggttaatcttctgagcaacatgacagaaacacctaatgtaatcaaccctataaaaggcaagaaaagactgttggattctgagggtttcgttggtggttgcttagcttggcctcgtgcacatgcacagaacatcacagtggcaggcctatgtggagaaggacgatgttcaactcatagcacttggaaacaaggcaagaagaaataaacatatggggaaccataaacagccttggaaggagacagctttctcctttatttctactggttaagaaccagctcagaaatttctagaacttccccaactggagatcaagcatttgacacctgagactgttggcgacattttataatcagataatgtctaacaggaatgaatagaatattctccttttctctgaccatctcaaccccacactgtttatgaatttggttttaaaatgtcaaaaaagaagaccatgtgatccatcaatctatcctgtaaactatcacttaacagcttagttaattagtattttaaggaatggccagataggttcagtaaaggacctgcgacctgtagaacctatttgatttcttcataaaaggaatgcaggtctgaacagagcctcactcatctctgtagagctggagagaaatcgttcccaagatgactctagtgtgagtcgggggagacgctgtgaaatcacatgactgtctcccatcagtgaaagttactgaattcactagggccatggcaaaaacaattgcatagaaatgagtcaaacaaaacaaatctgttgaatttctgtgatgaaacacttgccagtggcctctgattttgttctgggctggtgagtgcacagacattgtcccttaattacaggtctggttcttagacatcctccctcacagagatgtactcccttgcagaccctcgagtgtcccctgcagacctggggctgcatttccttttagtagctctgtaattcctgtgatttttgtctggagaacatgaaaacatgtttcttcttcgaacaaagcctcctgggataatgtgcatgctccctttgtgttcccatgctctgtagaatatgctattcatttcatattgatactatctcggcttctcttttgatgatcacgttgctttcctttaaacctccagacacagaaatgaatcttcctgcattcaaatccccagagtattatccaaggggatgctctctgagccagccccatgacctccaggacaaagcacacgtgagggatgcgatttacaagagatacataatgaaattcattttctctacaattgctgaagcattgtatctaagtagtactgcattataagcaggcccctttacaaagaagacacctattgttggccagaatctcagacttaagcaaaatgaggccagaaagcaaggtcttggatgccatcctgtgtggggagcaaaagacacctgtcccacgcctttccctgatcctctgtcagtagatctctgttctctgtcagcagatccagggagtaaatgaggacctttcagagcatctcctgatgtgtgctgtcttcgtggtggcatctgaagaatcacactgaagatctattggaagtaaaaaaaaaaattaaattgagttaggaacatgacagaaataataagaaattataagaaaatttaccgtgtatagtgtgatcgtcagaatgctcacccagtatggatctttggctgtttgccagtacgcagactcaaacctttcagaattaaaaaactcaggttcttggtactgagtcctaaactgtttccttgttgcctagtgattttgtttccctgcttattttgctgccttgtttgtttgtttgtttgtttgtttttgaggtccaactaagttgattaagtcatgaagtagccaaataattttcttccccgtagccacgaactttgactcgtcatcgttaacttgcatgataatgtgcctgcatttcaggccattggagcccagagcatcaggacccaaagagcttctcatttcactctcccacacagaagtctgagtgtcattggtttagtaaacttcaacgattgcactcggaaatgtttgtaaaagccaatgtcgttctccttcaactgtacagctaggtctacagctttgctgtggttgacagttcccactgtttttcagactccttccgccattgttactgaccatcctttcgctctctgacactccccttccctcggggaatacttttccctttgtaatttctaattctcattctgcagagacctggtaaacatcctgacaatgtaacggtgcacgaaaatgtaacatctttttttcatgtgaacagttgaaatacggattatctgtgtgtatgtgtgtgtgtatgtgtgtgtgtgtgtgtgtgtgtgtgtgtgtgtgtgtgtgtgtgtgtgtttgtgtccatgtgtacacttcacatgtgcatgtgaaggacaggggacccttgactgtgattctgataatgctctctgctttttgtttgtcacagggttcctaactgacccagatctaaataagtaggctacactggctgggtgtcctgtaagccccagtagtcatgcagtctccattcccaactcagggttacaagcatgcatcagccaaaccaggttcttttatgtgggttttggggattgcactcaagttctacctttaacaacagagctctctccatcatttgagtaaaatgctttcaagggtcttcaaagtgctttttaaacgctgtttctctcactgttcttgcttgactgtcctccttaggagctccagaaagccgtggaccaccgcaaagccatcatcctctccatcaacctctgcagctctgagttcacccaggctgacagcaaagagagtcatgacctgcaggatcgcttatcccagatgaatgggagatgggatcgagtgtgctctctgctggaggactggagaggcttgctgcaggatgcactgatgcagtgccaggttggtagggcttagggtgggtgatgatagcagaccagaccctaacattacagttgcttgaaggatgtggatgttcttcaaaggcagcatttgaatgaggtaactgttcttatcatgggagaatctatacctgtgagctacgttcaaggagttttgtctaatcttttctctagattaaaaaccagtgctcaccaagtgggcaagctttctttgactcattcatttatgtcattgactcactcaaaacacatttaccaaacatttagacaggtaagttttgcacaatacagcaagcatgacagatctttattcacccacctatgccagtattgagtttcttctgtgtgccaggtaaggctcagagcagttgagacaataacaacacaatctaaggagaaactgacaggttggctcggtggataagggtgcctgctaccaacctgcaattcaaatgggggaaggagagaactgacaactgaaagttgtcctctgaactctacatgtgtgtcatggcatatcacacacatgcacatacaaataagactataaatgtaaggtaaggaaatagttatccaaggaattgatagatgtatgtgggaccataatggaaaaaagtcatcacggaagggagggtgtactggctggttttgtgtgtcaacttgacacaagctggagttatcacagagaaaggagcctcccttgaggaaatgcctccatgaaatccagctataaggcattattagattattagtgatcaaggggggaggaagtacatcagcggagctaccatgagctgagtgctctcagcccctgggaaagtctgagaatggggcctcccttggccctaatggggctctccccgaacagggatgtgacttcccagaaagcagggcatgggcatgcatgggcagactgggcaggatagcctcgagtaggtggattcctccctcactggagcttggaacatactcatggccagcagggcaagttcaatggctgagatgaggcacctcgagggcctcaaaacccaacttgttccttggccatgatggtttgtgcaggaatagaaaccctgactaagacagagggcaaaggatcctgtggacatctgacctgatgctggaaggttgttgctatgaaggagttcagcagttgggagggctacgaagtatgcacaggtgttttctcttaggagcacccaagaaggtagtatgaccaggttatagccagcaaaacaggaagagatcagaagatcaagggccagttcacacagggcattgagctctgccagccttggactatgtgcagtgggatagggcaggatgggaagccctgggaagtgggtgtcctttctcctgtgtttctgccgtgtctactgaaggcagtgtcttgtatacagaggctcatcaataacaacgtcaagtaaggatgtcagaagatacatgagtgggctatagaattgagcctgtgtcttaaaaaaaaaatgggaaaatgtgagcacacagaggagagttgtttcttttcagattatctattagcaccactaggtttcgttttgtttcttagaaattaagtgttttaatgtcagtgtgctttctgcctaaatagtcccacaaggataagttagaagctttaggtaaacagataaaatcatgctgtgtgagttacaacaaggctgccgagatgagagcatagctactatacctcctatcacaagcaggggcctgcctcttgaccccagagatggttcatctactggtcattatggtgctgtatgtttactgatgatagccatagcaaagaattgaagctgggtggtggtgtgcgcctttcatctcagcacttggaaagcacaggcaggcggatccctgtgagtttgaggcttgcctgatctacatggtagccgcgaacttatgctattacacagagaaaccatgtcctgaaagagtaaaagaggaagagggagaggaaagggaagggaaggggaagaaggaggaaggaaggaagaaggaaggaaggaaggaaggaaggaaggaaggaaggaaggaaagaaagaaagaaagaaagaaagaaagaaagaaagaaagaaagaaattgaaatctgttctagaaaattatttatatctgctattattttatgctctctgttttttataggagttccatgaaatgagccatgccttgcttctcatgctagaaaacattgacagaaggaaaaatgaaattgtcccaattgattcaacccttgacccagagacacttcaggaccatcacaagcaactcatggtgagaactgctggtatttttaaaggcacattaaaaacaaacaaaacaaaacaaaacaaaaaaaaaacaaaaaaaaacctttgcatgctcttaacttgtgctctaactaaagtctctagcttagttctatagggtttctattcatgaaacaaatatttgtatacatcacacaggacaacatgattaactgttcattgcccagttgtactagtcttaagtgttctttatctcagtcccattgtgtctattaaggcagccatttagggaaatatacttactcatttttttccttaatatctctttctttttaaaaaaatttattagatattttctttcaaatgctatctcaaaggtcccctataccctccccctgccctgctcccttactcactcactcccacttcttggccctggcattcccctgtactggggcatataaagtttgcaagaccaaggggcctctctacccagtgatggccgactaggccatcttctgctacatatgcagctagagacacgagatctgggggtactggttagttcatattgttgttccacctatagggtcgcagaccccttcagctccttgggtactttctctagctcctccattggggccctgtgttacatccatatttgcagggtaggccaaatagcaggatgttggggcagctggtcatattgcattcactaccagaaaacagagaaatgagtgaatgaatgagtgagtgagtgagtgagtgagtgctagcactcagctcttgttctccatttatgcagtttcaggaatggtccctctcacaaccaaggcaatcccctaaaggaatggccagagacttgtgatggtagattctgccaagctgatagttaacagtatatagcacaatgcacttagtggattattgtaaaactgaattcaacctatttagatgaaaaaaaaaaaaaagacagttaagacactcaagaggaattaaataggccaggtaaaagagacacaagcattggtggcaagtttgcagacagctatgagataacttgctgctatatcttgcaaaaccaaaatatatctatctcatagaagctttttctggcactaaattcacctggaaatttactgtgaaaatccatattcaaggatgttgaaacaatgtaacagacagtgtagctgggtgattgctatagctgataaggaagcaggcttgagttctactagtagaccgtgcttctcatcctctctctctgtgactgtacaatgttgtagcatagcacttagagcccattaacctaaactattgaattagtagctttcattcaccattagagggatctttgaaaccaataggagatagtagtccttacatatttttattcaacctctacctctggcaaaaacttagaaattatcaatcaccacagagcatttaaaaacgatttagctagaccttagagtatgcccatatttgagtttcactgtacctagattttaatgttttatttttctgtctaacagattatctttgatcccgttttcataggattttcctttgtcaatatcttcacatcccctattcagtttaaacttccccatagttcttactatgaacccatgtgtccaatgagaatcctgggcttagaaggaggtcttttagaacatacttgaccatataggttagcatggagcccccgtgtcacatcatgtgagcttcagtcctgtgtggaggctgcagatacaagagcccatgcaggcaagttactctaagtactgaaacatcttaaagaactgtctcctatcatacacgcagcaaataaagcaggagttgctgaagtcccaactcagagtggcctcactacaagacatgtctcgccaactcttggtgaatgctgaaggttcagattgtctagaagccaaagaaaaggtccatgtgattggaaaccggctcaaacttctcctgaaggaggtcagccatcatatcaaggatcttgagaagttactagacatgtcaagcagtcagcaggtaagccctcacacactgtgtgtggcatcacatcgccgacagcagcctgaagcactgtgtctccacccatcatagaaaggctcggacgtgccacttgtcagacccagagtggccactctctgtcaccgctctttcaagagctgtctcagaatacaaaagcagactcgtaacttttataacaggacggtgcttttgattctgtgaaatccaagagacctcttcagcctgttacctccaaccctgttgctgtgactactgtggcatttaatttcaactgtttatttaagaaatgacatgttttcccatatacaactgtgacagaccagagcagccattgtgtgtgagtttcgtgttaaacactgaggagagtgtctactcttccttttgaatctatccattcagtcatgcatccattcactgaaatggaccgcttcgtgtttgttttggcccatttttccacttaaataaactctacaatggtcacattgttagttttgagacgtgtgcctatagatacagtggtacttagtcagacttcagacattcagttgtgaaatcttttcacaagcacgaaactgctcattcatctggaagtattcaaagcacagcctccccagagtcacaacagaatagaagcaacacggtttttctgaccttacaaagcagactcctagatagctctcacttgcttcgaacataaatgcactggactctgtctgtcctgagtgacctgtacttataaagaggatttccctcaccatgctactcccgcctcagcaagccagtaatcagcccgatctacccaagtcacaaagagataacaaagccacaaaaataaacactagctatggtttccagaagtcccaagcttataccaagaaatccctggtaagctaggagaactcggtttcagtcttgtcatctgaatcaggtttgcctgcggagtgcctgaccttcatcatggagatgtagatgaagatgaagagggctgaggtgggaactgagtccctgggtactctgggatgtggagttgttgaatgtgaccttttttcttgcaggatttgtcatcatggtcttctgcagatgagctggacacctcaggatctgtgagtcccacatccggaagaagtaccccaaacagacagaaatcggtaactttctgttggctctttccagttggtccatgggtgggaagtgtgagatatgacaggctttgtgtctacagaatccacaggctcaaaactcgagtccccaaacaggaaaggacagttacctatgtaaatttattcctccagccttgtagcatattcacagcaataaaacagagtgattttgtttttgtttttccttttaatgagctcaacgtgtggctaatgtacaagaagaatattttttcttgatcaaatggtcatttctagaaatggttctcatgtgtacccttggtggccccctttttcaaattaccaccagcatgcccactaaaaaggtgggttgtcatgcccagaagtgccacatacagtagaggcgaatcgtgagcatcttgtgagtcactgaattgataggaccgatgaagtcgcattgactctcaagagaaagagcttctgagtcataacacccaaggacttctgggtagtaaccccaaaagggcacccactcaaaccaacaccatacccagcccgcggtggaaaccgcctcaccagagcacacagaggatagacagcaaagttgtccccggtcccctctagacctcggttctctgtgtataggagcttgtttttatttttgtttgattttctttttggtccggctttataagtatattcattccatttccccttagagtatagaagtaataatttcctttgtattttgtcatatatacttacgttctatgctgatacatgtgttatccttactagactttcatttgtgtttttaccaacattcactagtttcctacagaccctggtctaagaatgtgaaggaacactggattttctactcaaaatttagccttgatttatcttcaggatgtgacatgttgagcttcagctcagtttccttaaaattcttactatggactctggtccctctaagtttccagaaggcaaaagcctatgtgaattatttctgaagtatacagaataatgaagtaaacttcatgtttagaatctctaagtgcacagagtgtcttataacacagagtcatctgtgctttagcctggagtggcagaggctgtgcccactgtgggtgcacactacaatcatacctcatgttatattaatggctgatactataaatatgagtctagtccactccttccactgaagaaaagccagtttccttgttctatgggtatcggtcattgcgtttgatttgtttgccctttgctgccttcttagttgttttcattggttagcttgtctttatttgcctggactgaacattcttctttctttaccccctgttcattgcaaacagccacgaggcaaatgtagtctctcacagcctggaccctctgtcagcagcccaaagagcaggtaccttgttctcctggtttccacctgttctagatcccctaagaggatgataaaaattgcccatgagttagggaagcctctaatctggtgtgtctcaggtggggagtggagatatttcacctcttcctagtagattggaagagaactctacccaaagagaacaggtaaatctcatagtggaatttgtcttccatcaaaattttgtttccctgtatttactccatctgatcttgtggatcaaaacatacactgtgtgtccatgaatgtgcaattcaattagtggcacaactgccattggttcatggcagattttatcatcctcttcccttctcgattttacaagaaggcaggtaactgatcagtgaattatttcacccctcacagaacccacaaatctgcataaaatatactaacattcccaagtttgtttgtttgtttgttttaattttaccttcctgttttatccagattgtgggttttagatttttcaaaatggccaagccaaatttggtgttcttcatttaaaattatgaagcactcttctgctcgccctaacacttggctcccagcaacaccctcaccttcctcatacttgggagctccttcactctgaagccagggtcagcccttgccctgttcactcacccctatgctgctgcaattcacacttgcctctagggtccccgttgcgccccccccaccccccgcagttagcaacgcttcgccttttctgttgttggtgtggtgtctgtatgcctctgacctgccaccactcagcttatgttcccccagaaaaatttttttctttcttttctttctgatttttctttctttccttttttttttttttcctttttgggaaatgaaaatacttttctagtagccgagttttcagtcatagttccagtctgttccccataaaaatatctgcccttttggaaacttaacaccactgagaagaaatctgaatggagatgaggaaatgcatagctgtaaactggccctcagtcatggtttcggtttatcagccatgtgatgcaggactggctatttcatgcatcatccttactcagctgaagtaacagagcatattttcatatgctttcttgtttcaagcccccttttactgtagtcccctccccctgcttttatttttgtatttggttggttggttggttggtttgaaaacaagggtctggttttttgtttgtttgtttgttttgttttcaacaatccataataaaatagcaataatgaaatattgaataaatctttctggcacctaggcagataatgatggtcatctgtgggtgatcgtatgccctcttcaccatccacctacaaggaaaagcaatcccatcctgtagggagcattgtattatctaattccccttctcccacaaatgaattgtggatgttccgtgaccagaggtgaagccatcccacagcagtcctttgagaaagccacagatccagtcctctgactgacaaaagggatgttgctaataagggaggaagaagttagatggcagcaagagtagccattggatcacaaataccaaatctatctgctcccctaattagtttaggctgccacctaggcgttctgaatggctaacatgttgtctcttaaggcatcagttgctttcatgtgcctaacaggtcttttaccaatgtgcctgccacattcccgctgcaatactcacgaagctcctatcggctctattctgcccagaatcgctaattaacactcctctgaaagttcaccagtgctctctcgggtcccttgggagggaatcgattgcaaggaggctttacctgggtgacatgctccatcaaacaccttggcaaacgagctcctcaactccagggaaccttggatcaggggcactcagccctgtcaatgggcacagaggggatgtttgcctcacttacagtctaggcagctatccattctttggcacagaagctgaccttgtgtttgatcttgcactgctccaacaaatctggaaggttaccgaagaagcacgggatttagagacagatgctatcttctgaaaacaagaaggagctagtttgggaaggtattggtttaaagggagaggttgtattttgttgtggttttcaactaaatggtaacaacatcctcacctgttatatatttcagttgaaatttaagttggcaattccatgttctcattgattattacaatagtctaattggatggaggcctgttactcagagtctctttaggccccaaatctacaaaatcaatacatgatgctttcttccattaagagatatgagatccagagattcctagaatcaattaccaagagcttccaaagaacttgctaagattataagaaaccaaaaatacaaaataaaacggtgcctgcatttatactgccccataatactactgggtttcatttgaggttaagcacatagaagtgtgccttcagaacagtgctgtttgtggtcccagcatctgacataagattctgtaaccccgtcaccaaaagtcttccatacagatatgcacggatgagcaacagtttaagaaactgggaaggtgatgtgctagttttcagcaagatagtagactgtgattctcttcaccctgtgtgggatgaaggattacttcactctacagctgagaacacagagaggcagaacttttctggatgcttttagttttggcctcttctgcacaaagaattaagaaggaataggagccaaaaaggactagctgaagtcctggtaggaggcccaagaaagaggggtccttttaaattgaaaatttcaaatttcaaaggtagtcaaatacatttaagcaagccagtagggggtttcttttgcttgttcactaagggactcctaaaggtgctgttcaattgattgtgaaatttgttttccaatttcttcaattggactcttcctggaagcccattgttcaaagcatccaaagagccttagcataaagcagttgcccttggagaggcagctgcattcatgcctgaagacaactgtagggtggggcaccaacaggcttctcttttgctcttctgaagtgggatgtcccagtgtttgggaaataatatctttgaaaccactgttagtaagtcagaaatgttttcccgagagaacagactgaattcagcagttttcaaggatattactcagcacaccccagtatagccatacagagaacaactgttaggtgctggcatttatctagtacttaatgtgttttgagcaccatgctaagaattgtgtgtgttacctcagttaacatccctgtgatatggctggctagatccctcaacttacagacaagaacaagagattagaaatatgaacacaggtctcacaagactctgaaccctactatactgaaaagacacctctctcccactgggatgtccatagtaggattaatcaagcaatgtatgcataggaccaggtgaactttccatttggaaggagggaataacagagccctcagttgcttcttgcaacttgccttctcagcacacagctaggagctactgaatgtcaaacactatagatggacagctagaaatttctgcatatggaatttatgtatcctgtctaacaagtgtcaaaacaaactgaaaatatcccccccagctttgtaagatgtacacatgtaattatctcattatatcttccttgaccctgtgggatctgcaaactgagttacctactatatgcagatccccaggcctcagggttctctttgttatatgcactttcttttgtgtcatttggttttagaccctggtccatcccttactttcctccttcttccatgagtatgtgttctagaaaagggacaaacagttatttttctgccaatctgaaagaaatagaagagaaagatgagatagagatttacttagagagaatatgcacatgttattctggacaaaattacttaaaatatccctattgattgagttctttgggtacagccacacagttaagtgttcccatacaaatgcagtctacactgtcacccttgtctatacagaagccattgaagaatggccatgagcaaggccacttatcactattgctctgtcttctattgaatttttcagtactcttgaaaattggatgaccttaagtcagtaagttaatattaaaataagcacccttttactctgagatgattaacctattggcgctaaaatctctaaggcagagtcaccctgatggagcaactttgaaactctgagaattcttacagttacttcaggttgagtgagcacttgtctcagtaggtagactggacatttagtccaattgcactgataaccactaagtactgtgtgttctctttgtccctgcctcctcagcccattacttctcgctaagttggcatcaacagtagaagtcaggtggcggttacattttactaaagaacgttctgatgtggttaaatgtgccatgtcctccaaaggattctgtcacatgtgagcccatgctctccaaatgataatctctctagttcttggtaggaatgaactggtcatgacaaaacctctgggttttttttgtttttttgttttttttatatcctgtcctttaacctcacagaagctaataattgacaaagaggagctatccagctccatttgattgaattcttaattgttttgtggaccttttcccatccctaaagtatctaaatatctcctggttgaagtggtcttgaggaatggagcttcatcttcagccatttatccagggtcagtgctgtttgccagggactattttcacatcaacatgtactcaaggatcatgccaaagaaaaacccagtacagagtctgccctccccttctatctcatatttctcaggacactttaaaacaaacaaactattgagtaagccatcaaagaaaaaatgactttggtacttaatatgctatgccatccgtcttctttgaaaacaatgaaaggaaccaaaaaaagaaaaaaaaaagaaagaaagaaagaaagaaagaaagaaagaaagaaagaaagaaagaaagaaagaaagaaaataatgaaaggaataccagagaagcaggtgtagctacctgaggattttgcgacttcctggaaacatagtcccctgacagtgatagaatgacatgtgacaaatgcctttatgacttgaaatgttgattttaaacacaaggaaactactttccaatgttttaggaagaaaacattggtgtttgcttctacatgtgaaatatatgtaacataaatgtgcctgtagttcatgtcaccaaccaaaggatcagagagtggagagtgtggtcatagatcaagatcaaggagtgcagtgggcaagagtctagggaagatcttgatagacttatttttaatgtgtcatttgactactgttagagtcagagtcctggagctgggaagatggctcagttctgtgcttgctgcataagcgtgagactgtgagtttggacactcagcctccaagtaaaatatatctgaaattctggtgctgaggaggcagagacagaggagctctgcactttattggtcagctagtcttgctgtgttcatgagcttaggttcagtgagagaccctgtctcacaaaataggaaggatagcaatagaagaagacatctgacatcaacatttggtcccacaaccacacatacatacacaaaaaaatgtacaaacacacacaaacacacactgatccttaaagagggtccaagttgggatcattgaagtctcttcactgggctccttgctagtgatctcaactcgggtcttcatcctgagagccttctctccatcatctggaatatgaagctaatgtgcacacatctcaggtgtcagttgtgagggtaaatgaggaatacccaagtgttgcctagcatttttttttcagaataaacattaactctccttagctacttacctacaacatgaggcaaagggctacatataccacccctatctaagcaggaatatcttataattgggagcttaggaagtttctgtttcacaccctcttcctattatagtaaggcacatcctatttattttacactttgctggttttccttgaaacatacattttctgctatccagctagttaggaataactcactaggtctggcatcaaggaattttcccattagatggtgaggcaactcttttggactctcagttggggcctgtttatattgacaaatcagtagaactcacaaatcacatagaatatggagttgaacaactggaagctctctggcctcattagaagagtctgtcacactgaggcaggctgagttggtcagggttacactgcctttcgttgtgggcttcagggagaagtgaggttatagtttaaggtggtgatttttctccctccgttatagttcaaaaccagactagagacacaggtcagtgcgaattgcttaggactttaacactggcctctctcctaccctcctcttacagttcaatcacagatttgcgtagctcctctgttccctttaagaaggttgtgcctgtatttttattgtaacatttattttctcaggcaccacacctcttcctccactaatctcaggtaatcttcagaaattaacagccaactgggaagctgcaaacatcctatctttttagaatctaaacctgtggagttaccaacatagattttatatctctgttaacaaaggcatgatgtccttatgttatacttaactcttgagaaaattcagattagggccttggaaatacatcttcttggtatatctagtagtttttgctcacaggatactgttagatatatatgtccataaaatagctgttgtaaaacaaaacaaaaccaaaaaaaaaaaattcttagccattttcacaagtaacccaacagagcattaatgactgctccaaaaagaagtgagttagcataccaacttagagcaaactgtttccacattcaggacttcagccactgtttcttatgaatgcctcaaacccctgtgctttccctaatgcagttaaagcaagatgggaaaacttggcactttaaatctagaaggagcttcaaagtgacaatctttcctctctgggaaatagtggtgattacacaaagccactgcgttggtgatagaccagactagaatctgctcttcattgcttgtgtttcagagacagacttcattgctgttctttgtgcagttttgaaactatgttatcctgttgaaacattattctggacaaaattatttaaaatacttaatatcaatatccattgactaagttcttcagacaaggttacgcagttaactttttcccatacaaattccatctacactggcacccacatttatccaaaagccagtgaagaatggccaagtgcaagtccacttatcaaagttgttctgccttctgttgaatttcccagcattctcaaaacttgtatgatctttcttaggtcagtaacttaatatcaaaaagtgccaggagcagatgctggtgagatgcaagatgaaagcaggcatagtctgagatgaagtatcttccctgggtctgagcagtgtgaccgagggcattcttaccctggtactacatggcttggatcttactcagggtgcttagaagtgacacactgtggggttctcgcaactcatttggtctaactgtgttcctgatattctgaagccaaaaaggaccacatcaaacatctatatcttagttatcctgagtttatttcatttatgcaattatcatttttgattggaaaatgttcaccaaactgagtagagggagcataagttggctgcactttgtcacctttaattgactgattggatgtttagtttcgagttatcatcctttcgcagaactgttcctttggtcatagggaagcgacccaggcagcctacagaaggctcacagatcttatctcggtggttgggaaatgacaagggcaccctgaggaagactgactactcagtgccaaattgggttgtgttttgcatggccctttatgtcccagggaggcactagagcaagaaacactaaagcaagcccatcatgtatttgagttgagttgtttatgtcaattcttcccttaggtccacaagagatggctccgattcctcccgttctgaccccaggccagaacgggtgggtcgagccttcctgttccggatcctccgggcagctcttccctttcagctgctcctgctgctgcttattggactcacctgccttgtacccatgtcagagaaagactacagctgtgccctctccaacaactttgcccgatccttccatccgatgctcagatataccaacggtcctcctccactctgaagcaagcagacatccccacacaagtgcaggcagtaagaggagaaggaatatcaaatggccgagaagcacctaaagaaaagttcaacatccttaatcatcagggaaatgcaaatcaaaacaaccctgagatggagacaaatgctccaccatgttcatagcagccttatttataatagccagaagctggaaagagcccggatgtccctcaacagaggaatggatacagaaaatgtggtacatttacacaatactcagctattaaaaaacaatgaaattcctaggcaaatggatggaactagaacatatcatcctgagtgaggtaacccaatcacaaaagaacacacatggtatgcactcactgataaatggatattagccccaaagctccaaatactaaagatacaattcacagatcaaatgaagctcaagaaaaaagaaaaccaaaatgtgggtgcttccgtccttcttagaaggaaaacaaaatactcacaggagcaaaatatggagataaaatgtagagcagagactgaaggagaagcatccaaagactgtcccacctgggcattcatcccatatacagttaccaaacccagacactattgtggatttcaagaagaaaatgctgaaaggagcctgatatagctgtctcctgagaggccctgccagagccttacaaaggtggatgctcacagccaaccactggactgtgcatggggtcctcaatagaggagttaaaggactgaaggagttgaatgggattgcaaccccagaagaagaacaacaatatcaaccaaccagtccccccagagctcccagggactaagccatcaaccaaggagcacgcatggctctagttgcagaggatggccttgtcatgcatcaatgggaggagaggtccttggttctatgaaggctcgatagatagatgccccagtgtaggggaattgagggtggggaggtgggagtgggtgggttgaggaacaccctcagagaagcagggggagggaagatgggatagggggtttcggggggggggaccaggaaaggggataacatttgaaatctaaataaagaaaatatccaattaaaagaaaaaaagaggggaacaggcccaaaacaaccccaggctgttagagaagacgtgatcttggcagaggtcctcatatgacagcttcagttctccataccctttgtggggggaaaatgagcctttggacatagacagtaaacagcaggagacactggacatagacagtaaacagcaggaggcacaaaacatgggattggtactgtgtcatttgacactctgagccttaataagaaattaagttaaggacatatagtgttccctggacccatgaaatctgggcctttggcatagccaatggctctctctactgggccatctgggcagctttcctatggtgctgctcgatcaacccaaaagcctctctcccaggcaccatgtcagtattgtacaacctatcatcccaccctgctgggggctttagaacttctcacagaccatttttaggaaggcatatggcagcttcctttctaccttggtttctttggggcatgatgctttgatgttgctttagaggcacaggctgtaaatctgaaaggcacttaaaaaaaaggtataaagaaaatctggatgtaataaaatcatggaaagctttatgtgaagaaaattgaatgttatagtataaaaaagatatttatgaatgtacagtttgctaaagccaagtttttgtttgttgatttctttgcatttattatagacactataaagaacgttgtcacaaaaaaaaaccttgtctgtgctttttctttctttaaaacataatttgaattttcattattcactaaaacaaaatctaagttatcttttcattgttagtgttaagccatactttaagtctggcaatattatttacatgttaaatagcatatacttggatgctttggtgatggtggaggaagaggaggaggaggtggaaagagagagagagagagaagagagagagagagagagagagagattgatttgaagtcatagaacaagtttccccctgaacaaatttggacagaaaccaaatcacattttctaaatgggtcagtatgacaggtgtactcagtggctggtgcggtctccttcccataactctggtggtcagtggaattaacaagaagtccagcattctcagtcactgccttggaggaagaacacaacacatgttggattctttgtgagtacaaaacccaaagtggttcttgttacttcagtacacaggaagttgaattcacatattccttatgaaaactagagagaaactcctaatattgcccttttggctctgttctaaatttttgggttttacccacacttgcttttttctttcttttttctttaatgaatggagctagaaggaaagtttgtactgaaggaaaaaggtagctagaggtgtgtatgcacacaggaacctgaagaggcctcttactctgcagcaaatcagatctcatagattccagcttcctacacatgcctttgttccctttgcacagttggaaaagctccataagatccctgtcagagccctctgctcacatccatcccaaaggtgcacatggtctgtgaatcttcctgaagcctccctttagagcactgctttttcctttcagctcttttgatccttagctactagctactaagatgaaaatttcttcctctagtatttatgctttaattcataagatgccaacacaccatcatcaagcaaagacaggacgattgaagagttagaagccagctagggcttttacagtgagatgctatctcaaataaaaaaatattaaaaaaagaaagaaggatgactttattctaccctatgaccttgccaactataggtcgtatagagtgatttgatgctaattaaattataatttatcattgataattttaggaggagcatattnnnnnnnnnnnnnnnnnnnncaggttcccattttcctttgtgtcctctctgcttccttcaccacctcggccacactagtcccctaaatattcaagtttatagattctgctaaataaattatttagaccaatctggggcacttacaaggccctgaagctgtctcctgtagtttctgctgtggggtaggttgggtaccgtctcagcaggagtctgttccagggcttagtaagctgaagaacttgaactcacatcagaccttgcatccatctctgggcagggccagggcattgcatttacacatctacttggatgatgctatccgtactgtggacaagcattaattagttaattaattgattagtttttatttacatttcaaatgttatctcccttcccggttttgccacacaaactccccattcccatcctatcccccttccctctgcctctatgagagtgctccctcacccaccctcccactcccacctcaccagccaagcaccctgctatgctgcggcaccaagcctccataagacctagggcctctcctctcattaatgactaacaaggccatcctctgctacatatgcagctggatccacgggtccctccatgtgttctctttggtggtttagttcctgggagctctggggggggtggaggggtctagttagttgatattgttgttcttcctatggggttccactaacttcacttcttcccctaactcttccattgtcttttattcttactattccttccctcctttcttatgaggcagcttacaagctacctcctagttgaagaatattctggccacttctcaaccatccttgacctccctgcactgatctttcttctttgggacattcctagcatgagtgctctattgtcttctctcaggcagttcctacctaattcccctgacaacaactcccaggaaggacgctcctttagaaaaatgaaaggcagctttgagagacaaccagcagcgtgcaatcagagctaaaggaacccctgagcacaggtccgagacggggcattcttcagcttccacctccctctcatgacccttctgcttgaagtagaagtgtggcctcttgttcacttcagtccttacaggtcatggcgctgcactgtgaagcagcagtggtagagaaagcaagcatgatgggaccacagaggcatctcctctccatgtgcagccgactcccttccacacacttcacatcattgaagaatccagtattagcatgtcagaagttaaaaaaaaatgtttcttacactgtgccagttatcaaccccagggcatcgtacatgctaagcacattgtcactggagtacaccccaggcgccacagagaaaaaatgatttaattaactccatgaaacacccaaaagtatatgacatgagcttccataagcattaaaaactggacttcacattgcttgtagaaagaactaaggaatctgtgcagctaaattcaggggtcagaagatcaagctcttgtccagatggtggcctggccatttaagcactgtcatgccagtgacagatgagcctctgcccagtgccctcctcatcttcagtgcttagggtagggcacacgagcatcatcccctgaccccaatgttaccctggcaacagccagagagtatgattatcagaggcttagtggaagggatgcatatgctgaagactattgaggataaagggcagtgatggtggttgttgaagtcacatttctatagtatggtccatcagtattccaaccatgagctgaggagaaggatgatgtcgcaagtatatggtaggtaaggaagggcatgggcctgacggtaatgagatgtgcccaatatgaactcagcaatggcagacaaggaggaagtctacaaaaaggagacaggacaactataggataagtaatctaggagctcaaagcaataacttcataagaaatctaggtaagcttctaggtaaacagtgctgggggtggttcagcagtaacacacacacacacgcacagacacacacatacacacacacacagacacacacagacacacagacacacatacacacacacatacacacacacacagacacatacacacacacacagacacacacagacacacagacacacagacacacacacacacacacacacacacacacacgggctcacttaaggattgaggaggtttgctttgccaaaactccaatgaaatttaagcaagcagttacggtagaaaggcacacaggggatagactggttttctgcctataccctaagttatcgtgttaaatttcagcaagtcacatagaagtatacagcaaagaacaagggagtgagatgatgtgggaaagctgaccaggaccacgtgatcagagcatgggtatagctgaggacagccaaggagagtttgctactttggttctttggtttcatttccactgtcaccgtcacctaagggccatagggaactaaggcattgcaagtaggttaattgaggactggggcagaccacatacagcccatgcccactctggagaaaaatgactccagcctttgtagacttaaatcctagctaagacttcaatccttcctgttcattatccatttgtagtggtccccactgggccctttgtatgcagaaaagcccaagccctcttccaacactcatcctgaaatgaaagccaagacaaggccagagaactgggatcaaatacagggaggggagggagaccatgtctagcagaggtgtctttgttttctgagaacaaatttcttttcctcatcacttgatagacagtagctcctgatttgtggcagctttcggtacagtttgaagagtgagaaggcgggaagagacaggcaggaggtttacagggccagagacaattttctgcttagtcatatgcaacgctgaggagccaattcaggtcatgagaggaggtgtttcgctgagcggtcactgaaattttagatttaataatatgttgtgataactctggctgccatacctcctgccacgaagacagtgaaattgaaaaagagtagcttttattcgacagtcccagtttctcacttttttctcctgcagagttgcaaagtatccatcatgagtctacagacagaccgaccttcctaggacccctctcattcaggtgaatgagcaaggcaggccagtgggctctgcctgcagccattgttgagtagtctcttgggactaagggttgagaggccgaacttggctgataaaacaggtcaagcaaagtgagaaatggggaacannnnnnnnnnnnnnnnnnnntgtgtatgtatgtgtgcatgtgtgtattgaatggtgtgtgtgtaaatatgtgtgtatatgtatattttatgtgtgtgtgtacctatgcatgccacagcacatatgtggagatcagcgggaaagtctttcgtgctggttctctctttccacctttagtgtttccagggatctgctcagaccttcagaacatcatgtgcttttgctcctgagccatgtccattggccccattttagaatgagattgatttatgtgcattgattacacaagactcctactgtggtggtttgagtaggtatggtccccatcactcatgtgtttcaatgcttgctccatgagaattagcactattaacaggtatggccttactggagtaggcgtggccttgctggagaaagtgtgtcagtgtgaaggcagggcttaaggtctcagtcttctctctgctgcctgcaagattatgatatagaattctctgctcctcctccagcaccatgtctgcctgcctgccaccatgcttcccaccatgatgatagtagactaaatctctgaaactgtaagccagccccaattcaatgttttcctttataagagttgccttggtcatggtgtctgttcatagcaataaaaccctaagtcctctactatatattattacattcaaacaaaatctgaaatagtttgtatcatatgattccaattctatagacacatgctgcatgtgtgtgtgtgtgtgtgtattcatcacacaagacaagataattagacatagttgaggtacaaaccttagcactgtaactgaactcacagaaaaacactcataatgtttgtatagtttaaatttgacaggaagcataatttggtttttaaatacaagttgctgttataatgatgacaaattgaaaagacaatggaaaacatctttgttcttacacaggagatgtttgatttgtttttcaatttagaagaagcttttttatacactccaaataaatagtgacaggccatttattaaaggtctcagaatgcactgggtggtagtgatgtactcctttaatcccagcacttgggagcagaggcagaggcaggtgaatctctgtgagtttcaggccaccctggactacagagaaacttacaggacacctgaagctatgcagagaaaccctgtctcaaacaacacaaaacaaaacaaaacgaaacaactcagaatcctaacaatagttccaggtgctcaccagaatgcttggatgctcggttggtttcaagtgttggcccaaagcgggtggaaagggtggatttgggacaggaaggcttgccaaccactgaacccctgaagaagaagtgacctggacgagatgtcacctgggcaaaaccctggaacttctaaccaccctccctcccaaacaaacttggctgctagaaggtgaaatcaagccatcaaagacaggggatacccccaagccccagagcgatcaaaggggaaggagcagagatgtttggaagtggcccagaagtcctaccaaagcctttcctggtgcctttctttccggacacaggcactacacattcaacccgctttagccttgggttctggtccttctctgatggctgatgcacactctcctcatgactgcctccataactccacaggcctcaccctaaccagagtgaaggaactgactggggaacaaatgatttagattttgagaaagcctgccttggccaagattccgagaaagtgccacctatagccctgaagcccagagccttcctggtcatgcggtcaacaagtgacttagcctttctgctccctggcctcctcctctgtagtgggacacttgtggtttgttctgaggggtgaatgcattaatgcatctggtgaagaccttgagttgcattcgggtttcctttggtttcagattgattttgataatgagaactgggggacactggctctttccagccttgtagatttttctttaaaaaaatgattagtattacaagtgtgnnnnnnnnnnnnnnnnnnnnnnnnnnnnnnnnnnnnnnnnnnnnnnnnnnnnnnnnnnnnnnnnnnnnnnnnnnnnnnnnnnnnnnnnnnnnnnnnnnnnnnnnnnnnnnnnnnnnnnnnnnnnnnnnnnnnnnnnnnnnnnnnnnnnnnnnnnnnnnnnnnnnnnnnnnnnnnnnnnnnnnnnnnnnnnnnnnnnnnnnnnnnnnnnnnnnnnnnnnnnnnnnnnnnnnnnnnnnnnnnnnnnnnnnnnnnnnnnnnnnnnnnnnnnnnnnnnnnnnnnnnnnnnnnnnnnnnnnnnnnnnnnnnnnnnnnnnnnnnnnnnnnnnnnnnnnnnnnnnnnnnnnnnnnnnnnnnnnnnnnnnnnnnnnnnnnnnnnnnnnnnnnnnnnnnnnnnnnnnnnnnnnnnnaatagcaaggcagaggcagacagacaccttggcctcactggcaagccagcctagtctggagttctgagttccagatgccagtgagatgtggactcggaagcaagatggttgacccttatgaggaacaacacccaaatctaacctttgtcctccacaggctcatactgggatatactgcaagtgtaccctacacacacacacacacatacacacacacacagatgcaaaacttaaaaagaaatataatctccatttggcaccttaacctttctctacattaacaaaaataaatgcttgccaagttatgaccaagcctcagaggccggcctacttcaggcatcccaaagggaagggctccctgcagaggtgacccagcccctgcagacctgctgctgacagcatgcatgcgtttgcctgtcttccttccatcagcctgtggtctgtggccctaggtactcagtcatgttctttctgcttgtaaatgtggaaatactctgagcattttacagctttcaactccgctgagtctgaatctaatttgagaactccatcagcccataaaaccgtttaccagctcacaaacctttcgctggctatgcccagaatcgttgatgtctcaatgaaaaggcagctgatgacaggttgtatagcagaagcctaagagcacagggtgtattcacacagtccccagatccctatctgtccctcagtgtgcagatagctgccacttggcaaaggcccagagttggatacttggtgccgctttccttgctcccagcctgactggaccactgatgctatcgcccccactttcattcttaaggaaatgtttgccacatgctgcctttgccttcatcctctttcttcgtagtctcctacaagagattgtattgtaagtgctacacaggtgtccaatggcttagccatggctggatcctgagccagcagataggaggaggtagtcttagacaggaccgctgagcctggccctgagactgacacacacattctgaaagaggcattgatgtgacaagaagccttaaccctctcttcaaggtctaggagacagctcctcccagtccaccagaccagaaactacttggtgactatttggtcacctgttgctttcccaagggcagacaggaagacaccagagataatctctgaatccaaaaagtagtgacaccctaaata

SEQ ID NO: 2481 - DNA, 8607 bp, Mus musculus
gccctgatggacgaggtgcagatgctacaagacgagatcaatgggctccaggtgtctcttgctgaggagctggtggccgagtctcaggagtcggaccccgcggagcagctagctctgcagtccacgctcactgtcctggctgagagaatgtccaccatcaggatgaaagcagctggcaagcggcagcttctggaggagaagctaagtgatcagctggaggagcagagacaggagcaggctctgcagaggtaccgctgcgaggcagatgagctggaccactggctgctgaacactaaggctaccctggatgttgcactgggtacatcccaggagcccatggacatggatgcccagctggtggactgccagaacatgctggtggaaatcgaacagaaagtggtggccctgtcgcagctgtccgtgcacaatgagaacctgctgttggagggcaaggctcacactaaagaggaggccgagcagctagcggtgaagctgaggctactcaaagggagccttggagagctgcagagggccctgcatgacagacagctcgacatgcagggagtcacacaagagaaagaggagaacgatgttgacttcacagacacccagagccccggcgtgcaggaatggctggcacaagcccgcaccacaaggacccaccagcggcagagcagcctccagcagcaaaaagagttcgaacaggagctggccgagcagaagagcctcctccgctcagtagctagccgtggagaggagattctaacccaacattccaccgcagaaggttcaggtggccttggtgaaaaacctgatgtgttatcccaggagttggggattgctgaagaccagatgagagtgaagtgggaaagcctacaccaagagtttagtgccaagcagaagctactacagaatattctggaacaggagcaagaacaagtgctttacagtagtccgaacagactcctgtcaggagtacttccattcagaggggaagcacagactcaggataagacttcagtgacgtccttgctggatgggctgagccaggccttcggggaggcgtcatcacagagtggagggacagacagacagagcattcacttggagcagaagctatatgacggagtctcagccacttccacctggttgaatgacgtcgaggagcgcttatttgtagccacggcacctttgccagaagaaacagaagcttgtctcttcaaccaggaggctcttgccaaggacattaaggaaatgtctgaagaaatggataagaacaagaacttgttttcccaagcattcccagaggacagtgacaaccgggatgtcattgaagatactctgggttgtcttttgggcagattgtccctgctggattcagtagtggatcagcggtgtcatcagatgaaggaaagactccagcaaatcctccgtttccagaatgacctgaaggtgttgtttacatcgttagctgacagcaaatatatcattctgcagaagctggcaaatgtgtttgaacagcccattgtggaacagatgcaggccatccaacaggctgaagagggactcagggacctcgagggtggaatctctgagttgaaacggtgggctgacaagttgcaagtggaacagtctgctgtgcaggaactctccaagctccaggacatgtatgacgagctattgatgactgtcagctcccggaggagcagcctccaccagaaccttgctctcaagagtcagtatgataaggctctgcaagatctggtggacctgctggacactggacaggagaagatgacaggggaccaaaagatcattgtatgctccaaagaagaaatccagcagctgcttgggaagcacaaggaatacttccagggcctggaatcgcacatgattttgactgaaatactcttcaggaagatcgttggctttgcagctgtgaaggaaactcagttccatacggactgcatggctcaggcctctgctgtgttgaagcaggctcacaagagaggggtggagcttgagtacatcctagagatgtggtcccatctggatgagaatcgccaggagctcagcagacagctggaggtgatagaaaacagcatcccaagtgtgggcctggtagaagagagtgaggacagacttgtggaaaggacaaatctctaccagcatttaaaatccagcctcaatgaataccagcccaaactgtaccaagcactggatgatgggaagcgacttctgatgtctgtcagctgttcagagcttgaaagtcagctaaatcagctgggagagcactggctcagtaatacgaacaaagtatccaaggagctgcacagactggagaccatactgaaacactggaccagatatcaaagtgaagctgcagctctcaaccactggctacagtgcgctaaggacaggctggcattttggactcagcagtctgtgacggttccacaagaactggaaatggtccgggatcatctcagtgctttcctggagttctctaaagaagtagatgccaagtctgccctcaagtcgtcagtcacaagcacaggaaatcagctgcttcggttaaaaaaagtggacacagcggccctgcgtgctgagctgtcccgcatggacagccagtggactgacctactgaccggcatccctgttgtacaggagaagctccatcagctccagatggacaagctgccttcccgccatgccatttctgaggtaatgagttggatctcactcatggaaagtgttatcctgaaggatgaagaggacattagaaatgccatcggttacaaggcgatccacgaataccttcagaaatacaagggtttcaagatagaccttaactgcaagcagctaacggcggactttgtgaaccagtcagtgctccaaatcagcagtcaggacgtggagagcaagcgcagtgacaagacggattttgctgagcagcttggggcaatgaataaaagttggcagctcttgcaaggtcgagttggagagaagatccagatgttggaaggcttgttggagtcatggtcagagtatgaaaacagtgtccagtctctgaaagcctggtttgcaaaccaggagaggaagctgaaagagcagcatctacttggcgatcggaattctgttgagaatgctctgaaggactgtcaggaactggaagatttgattaaagcaaaagaaaaggaggtagagaaaattgagcagaatggcctcgcattgattcagaacaagagggaggaggtctctggcagtgtcatgagcacactgcaagaactcaggcagacctggatcagtttagaccgcacggttgaacaattaaagatccagctgacctcagcccttggccagtggagcaatcacaaagcagcctgtgacgagatcaacggtcacctcatggaggccagatactccctgtcccgattccgtctgttgacaggttcctccgaagctgtacaagttcaggtcgacaatcttcagaatcttcatgatgaactagaaaaacaggaaggaggcttacagaaatttggctctatcaccaaccaactattgaaggagtgtcacccacctgtggcagaaaccctctccagtactctgcaagaagtcaatatgagatggaataacttactggaagagatcgctgaacagctgcactccagcaaggccctccttcagctctggcagagatacaaggactactcaaagcagtgtgcctctgccatccagagacaagaggaacagaccagtgtactgttgaaggcagccactaacaaggatatcgctgatgatgaagtcaccaagtggattcaggattgcaacgaccttctcaagggactggagacagtcaaggactcgcttttcatcctccgtgaactaggagagcagcttggacagcaggtggatgtttccgcagcagcagccattcagtgtgagcagctctgtttcagccagcgcctgggggccctggagcaggctctttgcaagcagcaagcagtattgcaggctggagttgttgactatgaaacatttgccaagagcttagaagccttagaggtctggatggtggaagccgagggcatcctccaaggacaggatcccacccattcctctgacctctctactatccaggaaaggatggaggaactgaagggacagatgctaaagttcagcagcttggctcctgatttagaccgtctcaatgagttggggtaccggttacccttaaatgacaaggagatcaagaggatgcagaacctgaaccgccattggtctctgacctcttctcagaccacagaaagattcagcaagttgcagtcattcttgcttcagcaccagactttcttggaaaagtgtgagacatggatggaatttctggttcagacagagcacaagttggcagtggagatctcaggcaattaccagcatcttttggagcagcaaagagcacatgagctttttcaagccgagatgttcagccgccagcagatcctccactccatcattgttgatgggcagaatcttctagaacaaggtcaagttgatgatagggaagagttcagcctgaagttgacgctcctcagtaaccagtggcagggagtgattcgaagggcccaacagagaagggggatcattgacagccagattcgccagtggcaacgctatagggaaatggcagagaagctccgtaaatggttggctgaggtgtctcatctgcccctgagtggtctcgggaacatcccagtaccactgcaacaagtgaggatgctctttgatgaagttcagttcaaagagaaggtgttcctgcgccagcaagggagctacatcctgacagtggaggctggcaagcagctcctgctctctgccgacagtggcgccgaggccgccctgcaggctgagctcacagacatccaagagaagtggaaggcagccagcatgcatctggaggagcagaagaaaaagctggcttttctgttgaaagactgggaaaaatgtgagagagggatagccaattctctggagaagctccgaatgttcaaaaagaggttatctcagcctctacctgaccaccatgaggaacttcatgcagagcagatgcggtgtaaggaactggaaaacgcagttgggaggtggacagatgacctgacagagttgatgctggtgagggatgccctggctgtctacctcagtgctgaggacatctccatgctgaaggaacgcgtggagcttctgcaaagacaatgggaagagctttgtcaccaggtctccctacgacgacagcaagtaagcgagcgcctgaatgagtgggctgtcttcagtgaaaagaacaaggagctgtgtgagtggctgacccagatggagagcaaagtctctcagaacggagacattctcatcgaagagatgatagaaaaactcaagaaggattatcaagaggaaattgctgttgcccaagagaacaaaatccagcttcaggaaatgggagaacggcttgctaaagccagccacgagagcaaagcctctgagattcagtacaagctcagcagagtgaaggacaggtggcagcatctcctggacctcattgcagctagggtgaagaagctaaaggagacgctggttgctgtgcagcagctggacaagaacatgggcagcctgaggacttggctggcccacatggagtcagagttggccaagcccatagtctatgattcttgtaactctgaagaaatacagaggaaactgaatgagcagcaggagctccagagagacatcgagaaacacagcacaggtgtcgcctccgtcctcaacctgtgtgaggttctgctgcatgactgcgacgcctgtgccaccgacgcagagtgtgactccatccagcaggccactcgcaacctggaccggcggtggaggaacatctgcgccatgtccatggagaggagactcaaaattgaagagacgtggcgactgtggcagaagtttctggatgactattctcgctttgaagactggctggaggtttcagaaaggacggctgctttccccagttcttccggggtgctctatacagttgccaaggaggagctgaagaagtttgaggctttccagcggcaggtccatgagagcctgacccaactagagcttatcaacaaacagtaccggcgcctggccagagagaatcgcacagactccgcctgcagcctcaggcagatggtccatgggggcaaccagagatgggacgacctacagaagcgggtcacctccatcttgcgcaggctcaagcacttcattagccagcgtgaggagttcgagactgcccgggacagcattcttgtctggctcacagagatggatctgcagctcaccaatattgaacacttttcggaatgtgacgttcaagctaaaataaagcaactcaaggctttccaacaggagatctcactgaaccacaataaaatcgagcagatcattgcccagggggagcagctgatagagaagagcgagccactggatgccgctgtcatcgaggaggaactggacgagctcagacgctactgccaggaggtctttggacgtgtggaaagatatcacaagaaactgatccgcctgcctctgccagatgaccatgacctctcagaccgagaactagatctcgaagactccacggctctttcagacctccgctggcaggacccgtctgcagatggcatgccctccccacagccttcttccaacccctccctctcccttcctcagcccctccggagtgagcggtcagggcgagatacgccggccagcgtggactccatccccctggaatgggaccacgattacgacctcagtcgagacctagagtcagcatcccgaactctgccctcagaagatgaagaaggcgaggaagacaaggagttctacctcaggggagctgttggcttgtcaggggatcccagctcactggagtcacagatgaggcaactggacaaagccctggatgacagccgcttccagatacagcaaaccgcaaatatcctcagaagcaaaacccccacagggccagacctggacaccagctacaagggctacatgaagctgctgggcgagtgcagtggcagcatagattccgtgaggagactggagcacaagctggcggaggaagagagctttcctggcttcgttaacctcaacagcacagagactcagacagctggtgtaattgaccgctgggagctcctgcaggcccaggcaatgagcaaggagttgaggatgaagcagaaccttcagaagtggcagcagtttaattctgacctcaacaacatctgggcctggctaggagagacagaggaggagctggacaggctccagcacctggcgctcagcactgacatccacaccatcgagtctcacatcaaaaagctcaaggagctccagaaagccgtggaccaccgcaaagccatcatcctctccatcaacctctgcagctctgagttcacccaggctgacagcaaagagagtcatgacctgcaggatcgcttatcccagatgaatgggagatgggatcgagtgtgctctctgctggaggactggagaggcttgctgcaggatgcactgatgcagtgccaggagttccatgaaatgagccatgccttgcttctcatgctagaaaacattgacagaaggaaaaatgaaattgtcccaattgattcaacccttgacccagagacacttcaggaccatcacaagcaactcatgcaaataaagcaggagttgctgaagtcccaactcagagtggcctcactacaagacatgtctcgccaactcttggtgaatgctgaaggttcagattgtctagaagccaaagaaaaggtccatgtgattggaaaccggctcaaacttctcctgaaggaggtcagccatcatatcaaggatcttgagaagttactagacatgtcaagcagtcagcaggatttgtcatcatggtcttctgcagatgagctggacacctcaggatctgtgagtcccacatccggaagaagtaccccaaacagacagaaatcgccacgaggcaaatgtagtctctcacagcctggaccctctgtcagcagcccaaagagcaggtccacaagagatggctccgattcctcccgttctgaccccaggccagaacgggtgggtcgagccttcctgttccggatcctccgggcagctcttccctttcagctgctcctgctgctgcttattggactcacctgccttgtacccatgtcagagaaagactacagctgtgccctctccaacaactttgcccgatccttccatccgatgctcagatataccaacggtcctcctccactctgaagcaagcagacatccccacacaagtgcaggcagtaagaggagaaggaatatcaaatggccgagaagcacctaaagaaaagttcaacatccttaatcatcagggaaatgcaaatcaaaacaaccctgagatggagacaaatgctccaccatgttcatagcagccttatttataatagccagaagctggaaagagcccggatgtccctcaacagaggaatggatacagaaaatgtggtacatttacacaatact

SEQ ID NO: 2482 - protein, 2764 aa, Mus musculus
ALMDEVQMLQDEINGLQVSLAEELVAESQESDPAEQLALQSTLTVLAERMSTIRMKAAGKRQLLEEKLSDQLEEQRQEQALQRYRCEADELDHWLLNTKATLDVGTSQEPMDMDAQLVDCQNMLVEIEQKVVSQLSVHNENLLLEGKAHTKEEAEQLAVKLRLLKGSLGELQRALHDRQLDMQGVTQEKEENDVDFTDTQSPGVQEWLAQARTTRTHQRQSSLQQQKEFEQELAEQKSLLRSVASRGEEILTQHSTAEGSGGLGEKPDVLSQELGIAEDQMRVKWESLHQEFSAKQKLLQNIQEQEQVKSPNRLLSGVLPFRGEAQTQDKTSVTSLLDGLSQAFGEASSQSGGTDRQSIHLEQKLYDGVSATSTWLNDVEERLFVATAPLPEETEACLFNQEAKDIKEMSEEMDKNKNLFSQAFPEDSDNRDVIEDTLGCLLGRLSLLDSVVDQRCHQMKERLQQILRFQNDLKVLFTSLADSKYIILQKLANVFEQPIVEQMQAIQQAEEGLRDLEGGISELKRWADKLQVEQSAVQELSKLQDMYDELLMTVSSRRSSLHQNLALKSQYDKALQDLVDLLDTGQEKMTGDQKIIVCSKEEIQQLLGKHKEYFQGLESHMILTEILFRKIVGFAAVKETQFHTDCMAQASAVLKQAHKRGVELEYIMWSHLDENRQELSRQLEVIENSIPSVGLVEESEDRLVERTNLYQHLKSSLNEYQPKLYQALDDGKRLLMSVSCSELESQLNQLGEHWLSNTNKVSKELHRLETILKHWTRYQSEAAALNHWLQCAKDRLAFWTQQSVTVPQELEMVRDHLSAFLEFSKEVDAKSALKSSVTSTGNQLLRLKKVDTAALRAELSRMDSQWTDLLTGIPVVQEKLHQLQMDKLPSRHAISEVMSWISLMESVILKDEEDIRNAIGYKAIHEYLQKYKGFKIDLNCKQLTADFVNQSVLQISSQDVESKRSDKTDFAEQLGAMNKSWQLLQGRVGEKIQMLEGLLESWSEYENSVQSLKAWFANQERKLKEQHLLGDRNSVENALKDCQELEDLIKAKEKEVEKIEQNGLALIQNKREEVSGSVMSTLQELRQTWISLDRTVEQLKIQLTSALGQWSNHKAACDEINGHLMEARYSLSRFRLLTGSSEAVQVQVDNLQNLHDELEKQEGGLQKFGSITNQLLKECHPPVAETLSSTLQEVNMRWNNLLEEIAEQLHSSKALLQLWQRYKDYSKQCASAIQRQEEQTSVLLKAATNKDIADDEVTKWIQDCNDLLKGLETVKDSLFILRELGEQLGQQVDVSAAAAIQCEQLCFSQRLGALEQALCKQQAVLQAGVVDYETFAKSLEALEVWMVEAEGILQGQDPTHSSDLSTIQERMEELKGQMLKFSSLAPDLDRLNELGYRLPLNDKEIKRMQNLNRHWSLTSSQTTERFSKLQSFLLQHQTFLEKCETWMEFLVQTEHKLAVEISGNYQHLLEQQRAHELFQAEMFSRQQILHSIIVDGQNLLEQGQVDDREEFSLKLTLLSNQWQGVIRRAQQRRGIIDSQIRQWQRYREMAEKLRKWLAEVSHLPLSGLGNIPVPLQQVRMLFDEVQFKEKVFLRQQGSYILTVEAGKQLLLSADSGAEAALQAELTDIQEKWKAASMHLEEQKKKLAFLLKDWEKCERGIANSLEKLRMFKKRLSQPLPDHHEELHAEQMRCKELENAVGRWTDDLTELMLVRDAVYLSAEDISMLKERVELLQRQWEELCHQVSLRRQQVSLNEWAVFSEKNKELCEWLTQMESKVSQNGDILIEEMIEKLKKDYQEEIAVAQENKIQLQEMGERLAKASHESKASEIQYKLSRVKDRWQHLLDLIAARVKKLKETLVAVQQLDKNMGSLRTWLAHMESELAKPIVYDSCNSEEIQRKLNEQQELQRDIEKHSTGVASVLNLCEVLLHDCDACATDAECDSIQQATRNLDRRWRNICAMSMERRLKIEETWRLWQKFLDDYSRFEDWLEVSTAAFPSSSGVLYTVAKEELKKFEAFQRQVHESLTQLELINKQYRRLARENRTDSACSLRQMVHGGNQRWDDLQKRVTSILRRLKHFISQREEFETARDSILVWLTEMDLQLTNIEHFSECDVQAKIKQLKAFQQEISLNHNKIEQIIAQGEQLIEKSEPLDAAVIEEELDELRRYCQEVFGRVERYHKKLIRLPLPDDHDLSDRELDLEDSTALSDLRWQDPSADGMPSPQPSSNPSLSLPQPLRSSGRDTPASVDSIPLEWDHDYDLSRDLESASRTLPSEDEEGEEDKEFYLRGAVGLSGDPSSLESQMRQLDKALDDSRFQIQQTANILRSKTPTGPDLDTSYKGYMKLLGECSGSIDSVRRLEHKLAEEESFPGFVNLNSTETQTAGVIDRWELLQAQAMSKELRMKQNLQKWQQFNSDLNNIWAWLGETEEELDRLQHLALSTDIHTIESHIKKLKELQKAVDHRKAIILSINLCSSEFTQADSKESHDLQDRLSQMNGRWDRVCSLLEDWRGLLQDALMQCQEFHEMSHALLLMLENIDRRKNEIVPIDSTLDPETLQDHHKQLMQIKQELLKSQLRVASLQDMSRQLLVNAEGSDCLEAKEKVHVIGNRLKLLLKEVSHHIKDLEKLLDMSSSQQDLSSWSSADELDTSGSVSPTSGRSTPNRQKSPRGKCSLSQPGPSVSSPKSRSTRDGSDSSRSDPRPERVGRAFLFRILRAALPFQLLLLLLIGLTCLVPMSEKDYSCALSNNFARSFHPMLRYTNGPPPL

SEQ ID NO: 2483 - DNA, 3105 bp, Mus musculus
atggtggtggcagaggacttgcatggcccgaggatggcagaggacagcagtgtggatgcagatctcccagactgcgactgcgatgtctccaggcaggtgaagaagctaaaggagacgctggttgctgtgcagcagctggacaagaacatgggcagcctgaggacttggctggcccacatggagtcagagttggccaagcccatagtctatgattcttgtaactctgaagaaatacagaggaaactgaatgagcagcaggagctccagagagacatcgagaaacacagcacaggtgtcgcctccgtcctcaacctgtgtgaggttctgctgcatgactgcgacgcctgtgccaccgacgcagagtgtgactccatccagcaggccactcgcaacctggaccggcggtggaggaacatctgcgccatgtccatggagaggagactcaaaattgaagagacgtggcgactgtggcagaagtttctggatgactattctcgctttgaagactggctggaggtttcagaaaggacggctgctttccccagttcttccggggtgctctatacagttgccaaggaggagctgaagaagtttgaggctttccagcggcaggtccatgagagcctgacccaactagagcttatcaacaaacagtaccggcgcctggccagagagaatcgcacagactccgcctgcagcctcaggcagatggtccatgggggcaaccagagatgggacgacctacagaagcgggtcacctccatcttgcgcaggctcaagcacttcattagccagcgtgaggagttcgagactgcccgggacagcattcttgtctggctcacagagatggatctgcagctcaccaatattgaacacttttcggaatgtgacgttcaagctaaaataaagcaactcaaggctttccaacaggagatctcactgaaccacaataaaatcgagcagatcattgcccagggggagcagctgatagagaagagcgagccactggatgccgctgtcatcgaggaggaactggacgagctcagacgctactgccaggaggtctttggacgtgtggaaagatatcacaagaaactgatccgcctgcctctgccagatgaccatgacctctcagaccgagaactagatctcgaagactccacggctctttcagacctccgctggcaggacccgtctgcagatggcatgccctccccacagccttcttccaacccctccctctcccttcctcagcccctccggagtgagcggtcagggcgagatacgccggccagcgtggactccatccccctggaatgggaccacgattacgacctcagtcgagacctagagtcagcatcccgaactctgccctcagaagatgaagaaggcgaggaagacaaggagttctacctcaggggagctgttggcttgtcaggggatcccagctcactggagtcacagatgaggcaactggacaaagccctggatgacagccgcttccagatacagcaaaccgcaaatatcctcagaagcaaaacccccacagggccagacctggacaccagctacaagggctacatgaagctgctgggcgagtgcagtggcagcatagattccgtgaggagactggagcacaagctggcggaggaagagagctttcctggcttcgttaacctcaacagcacagagactcagacagctggtgtaattgaccgctgggagctcctgcaggcccaggcaatgagcaaggagttgaggatgaagcagaaccttcagaagtggcagcagtttaattctgacctcaacaacatctgggcctggctaggagagacagaggaggagctggacaggctccagcacctggcgctcagcactgacatccacaccatcgagtctcacatcaaaaagctcaaggagctccagaaagccgtggaccaccgcaaagccatcatcctctccatcaacctctgcagctctgagttcacccaggctgacagcaaagagagtcatgacctgcaggatcgcttatcccagatgaatgggagatgggatcgagtgtgctctctgctggaggactggagaggcttgctgcaggatgcactgatgcagtgccaggagttccatgaaatgagccatgccttgcttctcatgctagaaaacattgacagaaggaaaaatgaaattgtcccaattgattcaacccttgacccagagacacttcaggaccatcacaagcaactcatgcaaataaagcaggagttgctgaagtcccaactcagagtggcctcactacaagacatgtctcgccaactcttggtgaatgctgaaggttcagattgtctagaagccaaagaaaaggtccatgtgattggaaaccggctcaaacttctcctgaaggaggtcagccatcatatcaaggatcttgagaagttactagacatgtcaagcagtcagcaggatttgtcatcatggtcttctgcagatgagctggacacctcaggatctgtgagtcccacatccggaagaagtaccccaaacagacagaaatcgccacgaggcaaatgtagtctctcacagcctggaccctctgtcagcagcccaaagagcaggtccacaagagatggctccgattcctcccgttctgaccccaggccagaacgggtgggtcgagccttcctgttccggatcctccgggcagctcttccctttcagctgctcctgctgctgcttattggactcacctgccttgtacccatgtcagagaaagactacagctgtgccctctccaacaactttgcccgatccttccatccgatgctcagatataccaacggtcctcctccactctgaagcaagcagacatccccacacaagtgcaggcagtaagaggagaaggaatatcaaatggccgagaagcacctaaagaaaagttcaacatccttaatcatcagggaaatgcaaatcaaaacaaccctgagatggagacaaatgctccaccatgttcatagcagccttatttataatagccagaagctggaaagagcccggatgtccctcaacagaggaatggatacagaaaatgtggtacatttacacaatact

SEQ ID NO: 2484 - protein, 946 aa, Mus musculus
MVVAEDLHGPRMAEDSSVDADLPDCDCDVSRQVKKLKETLVAVQQLDKNMGSLRTWLAHMESELAKPIVYDSCNSEEIQRKLNEQQELQRDIEKHSTGVASVLNLCEVLLHDCDACATDAECDSIQQATRNLDRRWRNICAMSMERRLKIEETWRLWQKFLDDYSRFEDWLEVSTAAFPSSSGVLYTVAKEELKKFEAFQRQVHESLTQLELINKQYRRLARENRTDSACSLRQMVHGGNQRWDDLQKRVTSILRRLKHFISQREEFETARDSILVWLTEMDLQLTNIEHFSECDVQAKIKQLKAFQQEISLNHNKIEQIIAQGEQLIEKSEPLDAAVIEEELDELRRYCQEVFGRVERYHKKLIRLPLPDDHDLSDRELDLEDSTALSDLRWQDPSADGMPSPQPSSNPSLSLPQPLRSSGRDTPASVDSIPLEWDHDYDLSRDLESASRTLPSEDEEGEEDKEFYLRGAVGLSGDPSSLESQMRQLDKALDDSRFQIQQTANILRSKTPTGPDLDTSYKGYMKLLGECSGSIDSVRRLEHKLAEEESFPGFVNLNSTETQTAGVIDRWELLQAQAMSKELRMKQNLQKWQQFNSDLNNIWAWLGETEEELDRLQHLALSTDIHTIESHIKKLKELQKAVDHRKAIILSINLCSSEFTQADSKESHDLQDRLSQMNGRWDRVCSLLEDWRGLLQDALMQCQEFHEMSHALLLMLENIDRRKNEIVPIDSTLDPETLQDHHKQLMQIKQELLKSQLRVASLQDMSRQLLVNAEGSDCLEAKEKVHVIGNRLKLLLKEVSHHIKDLEKLLDMSSSQQDLSSWSSADELDTSGSVSPTSGRSTPNRQKSPRGKCSLSQPGPSVSSPKSRSTRDGSDSSRSDPRPERVGRAFLFRILRAALPFQLLLLLLIGLTCLVPMSEKDYSCALSNNFARSFHPMLRYTNGPPPL

SEQ ID NO: 2485 - DNA, 40250 bp, Mus musculus
  misc_feature (1)...(40250): n = A, C, G or T/U
caataatatcagagccagttgataatgatacaagctgcccacttagatcaaacaagttctattcctatatgttattcataactacctgtggctatttaaaactatgtgggatcaggatcttttttctatccatccacctccatcttggcttctctctctccctcctctgagtcactctctgtctctgcaactctttgctccacctcccttttccctgtccaatcacagaccttcacagacctcctgctgcactaatattttaatataactggacagggaaaatcctgccacaaacaccttatctgttggctacagcacttaacatctctgagcctgggttctcttttatatgaagtgatgcttgtaaatacaactgctcctggaaatgcacagggagcttgttcagtgaccctgtttataccaggacatgcagatgtgcagttctttgttggaaatggtgtgatattggcaatgaacttactcatgtccacccgaattctttacaccctctgtaaattattttgaatatttaatgcaatataatccttcaaagatagctgatatatgaagttgtgtaggcacacctgatgggggaaaaagtctggacatattaatgacagacacaattttggttttcttcaatgctttcagtggactgagccgtgggtacagaatctctggctagaggaccagctgtgtgtatacttccgaattatgctggaattcaaacatcaactcccaaagggatggggatgagaaacagaaaagtaatacttacctccccaaactgttgttcccctccttgcacacacacacacacacacacacacacacacacacacacacacacacacagtgagcttcgaaagtaattggtgagtggatgatgaagggagtgttaattgttgtcacatgaaagagacctgtagcatagtaatataatgtaaccatgctatggaaacgtcattaggatataaaggagtatttctcaaacctttgtgcttggcagctgaacatgcagtgagaatcttgtgggaaaatgtcatgtaggaatttacttgtggctgttactactgccagataaattaacaatattaagtaaagattttaatttgcttatgatgggggccaatataacacaattgtccatttaaccctcacagagaaacgcccatttactccatcccagggtgccctgggcttacgtgatttacattaagtcatgaaaacgttcacatcagtccacacatcagactttggaaagcatggtgtaaggaaagaaataaatgtacatttttgagccaagaaagaaagaattggtggttatttaaattctgatttttctatttttcagtttgcattgtgtattaaattatatgacacagtgagttttcttgtggcattctggcacatctcctgatcacaccttttctgccctctcttactgccccctacctccacccatgtccctaataggcctccatgtactctcaagtccattattttattctcctaagtctacacatgaagaaaatcatgatatttgtttctcttagcctggcttgttttgcttaacatggtgctcttcagttccatcatcctgctttctggcagaacatacatcttcatcatggctgttggtcacattttctttccatcatgggcttcctcaagtcaccccttctctatgtgggcctttattagtgatgagttctacttaccacattccaaaacaaaatttaatttttctcctttgttgccaccccaaaaaaaggggtgtgccaaacaaaaagtttctcacaatggcactgtgccagaaccacagggcaggatttactacactaaccaggataaggcactgatcttcctcaagttcctgaatacatagctctgagccatgctgtggtgtgggaaatattaaaatgaacggcaagttcctgcactttacccagctatccttagccccggcggtctcggtggccagttcttatcttatggagactctctgactcagagccccaaaatctctccacccagcttgctaaattctcactggagggtcactaccataccagccccatgtttcaaagccccatggcctttgtggtgcacatctggcaaacccaccccttgctgctgtacctttctctcttgaatccagtcaatctgctgcgtgaaggaaaacaccacacaaacttagttcagaaacaatggtaactcaaactctggttgccacgactagaatcctaattttgtaagacacattaattctaaatcctccagtggtactcatcctggtggattcaccatataagccaggagacgctagtagctacatcttgccctctcgctatccccatcaaaaagcccctctctcctgcttcctctcttcctccaaaagtcccgcctactctcccagtgattgatgcctttattcattaggggatggttcacaaggagtcgcctgagtaagtgacttattcctcggtccagaaaaaccctcctgggaaagcaggattaacatcaaagtacaacagtaccagggccatccacagcaccactaccctcccacagccgcactgtatgcctgcctcccacttgaaagaagccacagaagggatctagagactatagtccatctggatctgagacactggaggcaaacaaattttgtttggtcaaattttctttttctgttctttattctttgttttgtcccaactagttaatgttctccttgttagacactgtcttcctgccagagtgtacaggcccccacagttgactagtactgacatatggctaaagctccctgttgttactgaggagttctcacgggaagactcagtgctaagctttgaccagcatctacactgtggctccaagctgtattccaatcagaatcacatttttatgaggcatggaattaggaattgagctgagaaaaagtatggcagatttacctttgaagttaattctagcaataatcatttgaaagtttttctattggttaggattaaggtaactctattagtcacaaaatgaataattatcctttaaattacatgtacttttaatcttatttttattttttaaatttagtttaatttttttttaagaccaggttactccatgtagccctggctgtccgggaattcagtctgtagaccaggctggcctcaaactcacagatacttacctgcctctgtctcttgggtgctgagattataattcaattcttgacagcttattttcttgtcattttgagaaattgagctgtctgggccagctgccctcccctgggtcatgggatgtgaaatgatccgtttcacactggctactgtgggtcatgaggcactagatggttcttttcactctggttaatggttagtaagactcactggatgggaaacactttgcacattgaatgaataccaaagacactgtatggttggaaatagatctgtacttcttatagccaccggagaagctggcaagttctctgtgttccctattactccatgtgccttcaagaatagcattcaggccaaggcctggtcaaggcatccaatgccatccatcatcttttagaataaattccaaaatttatgccacagcccatgaatagactgttttcataatttgtctaacaaaggaaaagttgaggtgtggacttgggggacatcttcttaagtcccctgcccccaccagggtcatttagtggtgattaaacgcattgtaagttgccacaattaacagtcattgggatgctgaagtccagggatactactggacattccataatgtttcagacagacctatcctcacagagctatttacctcagatctcagtggttctgagactggacatgctaactagaggcagaaagcagaacaccaggatgcttgtcttatttcatttaacatagttgcttccagttctacttatgtcccatcacagtacacgattctatctctccttagagcagaataaaactacactgtggacacatgatggattttctttacactgtaagctttcctgagccattccttgccttccagccttttattacagatgcaattaatagctttgatagcttccatgacttggtctctgttcacccttttgaccactgattgacagcctccaggacttggtctctgtcgactcagggttccctctgctttggcttttgcacccactgtccatcctttgtcgtgtttgatggctcacttcctgaatatgttccgatctaacactctgagcagtcttggagatatgctgcttgtgcagtagcaatgctttctccacaccgtctagactctcagcacctttctttcctacttcttgtgccaggcatgcatctgctgatctattaccttgtttttcctcagaagagtgccagtccatgagagccaagattgtgttatttggagtgctttatacactgtatctaaaacatatgtttcctcaatgctaagcagctgtgtgtctgtgtttccatggagaaatgaaaaaaaatttcacataagcccttcttggtggactctgaaaaagggaagagcaggtgatgaactttttgcatcaaaaggaaccctggtcatatcactctgaagaagctccccagctgaccctgacagtgatcttgtctcaggctatacacaagcataactaagcagagacaagtgcgctgcgatttcttctcctaaatgagaatgctggtagaaaaatccagagagtctggagacaagccttacgttgcccccttcccagaccacgcagacagctttaattataatgggaagcagatggcggacaaacagatcctacagtgtgtttggaattctctcccatgagtcacaaatatatttcaggacagtgtggaaaacactgacataacaagatgatttttgatatatcaataaaaggctaccaactgcacagttcgccaccaaaacagtgcacccctcttgttcaacctgacaatcctttttttttttttctttttctttttcaggtcaaacacttcagagctttgcaagagcaggccaggacctacttggatctcctttgctccatgtgtgacttgtcaaactcctcagtgaaaaacacagcaaaagatattcagcaaacagagcagctggtaaatatatatatatatatgttcatgattgcaactaattgtctgctttgtctgccttgttatcttctctccatcttcaaagctgtgagatttaaagaaaatatttctggagatattcttgctataaccctcttcaagccacagtaacaagtcaatatgtgatttattttattttattttatttttgccatcccagaaaggaaggtagatactaagtcagtggagtcaccactgaattgtttagtctgtacaaccaccaccgctggcaccttcctccaccttaattaccagtctctcgtggttttcctagtccctcgcgcctctttctgttgttcttttctcctttcccatcctgttctttaaggaatacgctgaagagtccactgccctagcttttttatataaggcccaccaacgggctactgcttaaatccttccaaagggtgacagttgtaataagacaaattatacacttccaaaaaccagaagggcagatctaaagacaatctaaaacattgatagggctatgtacagcagtgtggtaaatctgaaatcccactcctggggtccgggtaaaggaggttgaaacaggaggattgccagaatttctaggcctgtataattcactttccaaaaaataaataaataaaaaagcagataacaacattaaaccatgtttttaaagatgaagaaacaaatatataagagatgtgagcctttcttaattactcaaatcccaattttccagtcaaatagatgtatttactgcttggcctaaatggaaaagctcttggggaactctttgatctcatacattggtaaaatttcttggatctttgcagcactgattaaaaatcacacaggagaactcttagatgttttaattcgttggaaactcttaaacctaaaggaaatctgtttttctttgatacaaataaagaagtgcctttcggatctggctgagcgggagcacaggaccaggctcttcccagcaacccactggcaacccagaggttacattcactgaacagagatgaggtacggaaaatgaactaacatttaactgtgtgtcctccagattgaacaaaggctggtccaagcacagaacttaactcagggctgggaggagatcaagagcctgaaggccgagctctggatttacctgcaggatgctgaccaacaactgcagaacatgaagaggaggcacactgagctggagataaatattgctcagaacatggtcatgcaagtgaaggtaggaactgatgcccgcacggggtcaggggtcagggaggaagccaagacagagcaagagatgcaatgcactcaatatattcgcttctgtacgcccaggggcgttgtgaatccttagtactggggcagccacttaagcaataagagagtatgagttgcagagaaacatgtgctgagcacagtaatgtgtacctgtagtcttctctacttgggggctagggagggaaaatggcttgagcccgggaggtcaagactagcccaggcactgtagcaagaccccatctcagtaagtaaataaataaaatttcaagtatattttcagagttctgcatggccattttcatatgaaacattcattatatacaagcaagacagctgacctttagcccacaaaaccaggaagtctgtttaataaacacagaccttagtgttcatattttcattgcatatagtcttgaggtttggtctgtggctatgtattgtaatgttaattctgtacctaaaggtctaggcctataagtgaattctctgggttaccagcttttgccgtgcaaaccttagtttaaaactattggttaaataaaaatggctacagccaataaatgaagagatgaaaggtacctggattttaagtcacctcaccggaggtgaaggaggagaggggagagaaaacaaggaagagagaggagaacgcaccacaagaagagaggaaccatgagcccatggccagaagaaacaggaaatatctagggtacataactggggaggtagccaggcccacaactagaaaagtacattaggggttacttcccagtaattgtcaaagccaaataaaaattatagtctgagtctcatttatttgtaaactagacagaaataagcttaaattgcttccactacactatagctatagaaatgtaagcctacttgttaaatgcatcgattaagttaaataaagcagaaatatattaataatctgtataatatatatttgtgagaattataagtattataagtatattccaatcaattaacttgattggaatgagggtcatattttaaacaagctttaagactgctttctttgataagttatttctattttctcctggaatattatttgtaactacataataaaaaagaatagagggaaactgaactaaatttattttttcccataaaggcataaactattgttttcattatttaaaagtttcttccatagtattttgagaaaaataagaccttacttcaagaaaacttacttctcaaaataattcaaagcaagaaaatatcaaagttactctgattctttcacaggtgggaatttgtgtttagaagaaagaatcatggttgttttttttttttttttccaattttcagggatatttatttcaaagctatttgtgtttctttctgttcacttggcaggacttacacattatttcttgttttacattttcaccttcaggattttattaagcagctacagtgtaagcaggtctctgtgagcaccattgtagaaaaggtggacaagctaacaaagaaccaggagtcccctgagcacaaggaaataacccacctgaatgaccaatggcaagacctttgcctccagtctgacaagctatgtgcacagagagaacaggaccttcagagaaccagcagttaccatgaccacatgcgtgtcgttgaagcctttcttgaaaaatttactacagaatgggacagcctggccaggtaacagaactcgcccagtggttcaccatgatgctaagtcagaagttgacaggatatccctaacatcctcatgttgtgcagttgtagactggagggcttcctggtttaatttagcatcaattaccaataggcaaaagagacatgtttgtctgtggtctttagcactgtccccatgataactactctgaatcttttcaccttggttaactgccaatcattgcttgtcatccatgactctctaaagtggatgtaccttaagcaaaagtgtccctgcacatctgggaagtaacatattctaggtactttagtcaaatttggtcactgtataagaaacttttgctgttgttattgttgctctgaccaagtattgtttaggctcagaatgtgagagggatacagtccatcacagaggaaaagatgtggtgacaggcatcctcacagtggtagtaggggtatgtatctggcctatcgccacattgcggaacaagaagcagaaagcaggtaggaagcaaactgtgttattaaaactcaagactcattctggtgacctacttcctatagcaaagctctatttcttaaggctcctaccattctccaaagaggaagaccagctgcacacccagtgtttgagctcatgaacgtctggggaaacactgcagtttcaaacacaacaggcgtgttgtagaacnnnnnnnnnnnnnnnnnnnnctatgcccttttattctttgaaaataagtgcctttcttacacacacacacacacacacacacacacacacacacacacaggccacacacgcatgcgcacgcacacacaggcacacacacacacacacacacactacacacacaggcacacacggcgtgcgcacgcacacacaggcacacacacacacacacacacacacacacacacacacaagtgtgttatatgaaaacactcccatgcttctgaatgctacatttttttaaaagaatgaacatttctacataacgtattaggtttttgtaatacaaactggcagaattattccagcatagacacagcatggtgatgctttactatttgtttgccagagtattttctcagtttttaactctttgtaaatgctcagcactttactgtgttttttttttaaataaatgcagtcaatatcagctatacctccccatatatatatagctagcttacggtaatcctacgagtaccttaaacctcgtgcatccaagaccaaattcaaccatactgtcaataagcctgatttcttatacttcagaactgatcaccaagaaattcaaggcagattataatatccagcttttcaccttgggctttgtaatgaaaatagtgatgatttataaatcacacatttatttttaaattttctcatatctaagtacagagataaacagaaccaggtacatacaggcagtccatgagcaatttgtaccttctagattgtaccatcacgcactctatcgtttattgtccctcactccaataagaaagactataaatagatgattattgattgcattgcttctgacatgtgtttccctatatgtaacacaacacatagcatgttactaggcagatcataaagattcagagaaagctaacaacacatggagatattactggagaggagcattgtccagataaaagacagttgagaagcaggtagccaacgtgatctgactcaagggctagatggatcttgaattcctaatgccaacagcttcatcagttagccataaattcaggtagtcatggtgaatcagagctccgaatgtcccgtcaatgaaatgttatttaagaggctaaggacctgacatgctcctgtggtatctgtgtatttacaggtctaatgcagaaagcacagctatccacttggaagctttgaagaagctagccttggccttgcaagaggaaatgtatgccatcgatgacctgaaagactgcaaacagaaactgatagagcagctgggtctcgatgacagagaactggtgagggaacagaccagtcacctcgagcaacggtggtttcagctccaggaccttgtcaaaaggaaaatccaggtgtcagtcaccaacttggaggaattaaatgtgatccaatccagattccaggagctgatggagtgggccgaagagcagcagcctaacattgtggaggccttgaagcagagcccacctcctggcatggctcagcacctcctcatggaccacctggccatctgcagtgagctggaagccaaacaggtgctcctgaagtccctgatgaaggacgcagatcgtgtgatggctgacctcggcctcaatgagcggaaggtgatccaaaaggcgctctctgaggctcagaagcatgtgagttgtctcagcgacctagtgggccagcgaagaaagtacttgaataaggccttgtctgagaaaacccagtttctcatggcagtctttcaggccaccagccaaatccagcaacatgagcgaaagatcgtattccgggaatatatctgcctacttccagatgacgtgagcaaacaggtcaaaacatgtaagactgcccaggccagcctcaagacttaccagaatgaggtcactggactttgtgcccagggtcgggaattgatgaagggaataacaaagcaagaacaggaggaggtgctgggaaagctgcaggagttacagactgtctatgacaccgtcctgcaaaaatgcagtcaccggttgcaagagctagagaagagtctggtctctagaaagcattttaaggaagattttgataaagcctgccactggcttaaacaagcagatattgtcacttttcctgagatcaatctcatgaacgagaagactgagctccacgctcaactggacaaataccaaagcattctggaacaatctcctgagtatgaaaaccttctgctcacgctgcagacgactgggcaggccatgctaccgtcgctaaatgaagttgatcactcgtacctaagtgaaaaactcagtgctctgccccaacagttcaatgtcatcgtcgccttggctaaggataaattctataaaacccaggaagcaattctggcccgaaaggaatatacttctttgatcgagttgacaacccagtctctgggtgacctggaagaccagttcctgaagatgaggaaaatgccttcagacctgatagttgaggagagtgtgtctcttcaacagagctgcagtgcccttctgggtgaagtggtagcccttggggaagctgtgaatgaactgaaccagaaaaaggagagttttcgcagcaccggtcagccttggcagccagagaagatgcttcagctggccaccctatatcataggctgaagcggcaagcagagcaaagggtcagtttcttagaagacaccaccagcgtttacaaagagcatgcacagatgtgccggcagctagagagtcagctggaagtcgtgaaaagagagcaggccaaagtgaacgaggaaaccctgcctgcagaggagaagctcaaggtgtaccactcgctggcaggcagtctgcaggactcggggattctgctcaaacgagtggccacgcacctagaagatctttctccacatctcgatcccacggcttatgagaaagccaagagtcaggtccagtcctggcaggaggagctaaaacagatgacgtctgacgtcggggagctggtgacagaatgcgaaagcaggatggtacagagcatagacttccagactgagatgagccgttccctagactggcttcggagggtgaaggcagagctcagtgggccagtgtgtcttgacctcagcctccaggacatccaggaggagatcagaaagatccagatccaccaggaggaggtcttgtccagcctgaggataatgagtgctttgagtcacaaggagcaggagaagttcacgaaagccaaggagctgatttcggcagatctggagcacacgctggctgagctccaggagctagatggagatgtgcaggaagcgctgcgcacccggcaggtctgtagggggcgctctatctttcttttccaggctgcttatctataaacatgtggaaaaaaaaatctggtttgggttggttctctgtttaaaagtccagctatattttacttaagtgtgtaggtcatgagtattaatccagcatttgcgatatggagccaataagatcaggagttcaaggtcatcgtcagttacaaagcactatgagaggctctctctctctctctctcctctctctctctctctcacacacacacatatcagaaaaccacgaaacactgcttttttgatggtttatcaaatcaccttcagtgtctttaaagaccatttttgttgtttatatgtgtggtcattgtcaggtggcccatattgactttttgtttagattggtatatcataccatttttctcacctttagaggagataataaatgactttgataacatagcttacaagagattcaaacaaactcataatctcctcctccttctcttcctcttcttcttcctcttcctcctcctcctcctcctcttcttttgctgttgacttacttatttttattgacatatattcactacaaatggttctgggtttcataacgatttttttaaagatttatttattttatgtatatggtgagtacacttttgctgtcttcagccataccagaagagggcatgggatccctttacagatggttgtgagccaccatgtgattgctgggaattgaactcaggacctctggaagagcagtcagtgctcttaactgccgagccatctctccagccccaaagatattttcatacaataccctccatttgtctcctgtctttccctagtcagtattcatttccatgtcatgtacatgcatgtatatgtgtgttcacacctacataaggtcagggatccatacacacagttacatccattcttctacaaatgacatcatcctgttctttatagccagataaaattctgttggatatgcatgtcacattttctctgtttattcctgtttgtggacacttgagccaattccacaactaaattactatgaaaggtgttgtagtaaaagtagatgtccaagtgtctctgtggaatactgacatagagaatccttggggaaaatacccaggagtagtatgcctggcttatacaatagatctgttggaagttttcggagaaatttccaaactaatgtgactgggttttttgtttgtttgtttgttgtttttaaagatctgaaacctgtgcagacctttaacctcttcacacttctcttttaacagtaaagtttgacagcattgtattaggtgttacaggggatacaaagatgatatcaagcatggcaggatgtgtaggtcacacacacactgcagtgctgtacacacattccttgagcgtcttaaattagcagaggtctgggcataattcccataaagaggcattgtgaatacacttatagaatatatggccagtggatacttagtgctctttctatactacatgacatctgacacttcaaaaataacattggatggagaggctccaaaggcagtgaagccaggtgaatggcaccgatcattcattgtgtcaaggcatgttctcttgtaggctgtcctatccgttgccctgtttcttcccccctccttcaggtaggggtgctccctttccatggtgtcaaatgtaacacagcagaagcaaggggcttctctccgctgctcctgagacccaggaactacaaacagcaatggaaacatgcggagacctccccagattgcccacctacggatgctttgctcactcgcctcattctacataagatggaagttacagtggctactaccatagagctaattcctttaatcccctggtctcaaagctagggatgcagcttttccatcatgcacatggtcctgagttttaattctcaacatcccttcaatggagcatgatgatacatggcagagaacctagatcttgagaagcagaggcaggtggattatcaattaaatgtctacataaagagtttgaagccattcttgactatatgaaaccttgtcacaacagatgctaatcatcctggcctggagagatggttcctggtttagaatgtttgctgttcttatggaggacctgaacttggcaatcttgagctggctcataatcacctataattcctgttctaggtgaactgatgccccctctgtacccgttgggcaccaggcatccagaatctacctatcagttacctgtacttcctacacagattaattctaacacttaaatagcaaaacctttagtgtttaagtaaggcatacaataaaatgcttgattttcaaagtgtgcttagcaaagttcttcatgctaaatcaaaaccatcaaacttttaaaatgatatacctacagctctagatacagagacaggccctgcgcgcaggccaaagacaggtcttttctattaaaaatcatctgtcacagtggttgtcaagcttcctaatgcgctgaccctttaatacagttccccatgttgtggagacccctcccaaccatgaaattatcttgttgctactactactgctacttctccttctgcttctccttctcctcctcctccttcttctttcttctttcttctttcttctttcttctctcttctctcttctctcttctttcttctttctcccttcttctttcttcttctttaacttgtagaaggagtttatttaggtttaaaattccagaggggtaagagttcatcaatgcaagaaagtttgacagcaggcagccagggcagcctaagcaggaagctgagcactttcatcaaccacaagcagaaagcagaaggagcaaactcacaaagcctatctcaagcaaaaccacacctctagccttcccaaacatcaccaacaactgggcacagaatgatccaaatgcctttgggggacacttctcatccaaacctgggctttctttcagaatgtcagactttcaagcccaggcttcacgggctctactcctcatctctgggtttggtgattgtatatgggatggatccccagatggggcagtctctggatggtcattccttcagtctctgctctatactttgtaactcctttcatgggtattttgttcccccttcgaagaaggatcgaaatatccacactttggtttgagtttcatgtggtttgtgaattgtgtcttcagtattccgagcttttgggctaatatccacttattagtgagtgcataccatgtgtgttcttttgtgattgggttacctcactcagatgatattttctagttctatctatccacttgcctaagaatttcataaattcattgttttaatagctgagtagtactctactttgtaaatataccacattttctgtatccactcctctgttgaggggcatctgtgttctttccagcctctagctattataaataaggctgctatgaacatagtggagcatgtgtccttattaccagttggaacatcttctgggtatatgcccaggagaggtattgcaggatcctccagtagtactatgtccaattttctgaggaaccgccatactgatttccagagtggttgtaccagcttgcaatcccaccaacaatggaggagtgttcctctttctccacatcctcaccagcatctgctgtcacctgaatttttgatcttagccattctgactggtgtgaggtggaatctcacggttgttttgatttgcatttccctgatgattaaggatgttgaacattttttcaggtgcttctcagctattcagtattcctcaggtgagaattctttgtttagctctatgctccattggtaccgcttttcaacttgacaaatttacacatttctaaggttcctctgagtgtgttgctacttcttaactatatttttgcttctgttatgaatcacaatgtgaatatttgatatgcagtatatctgatatgtgaccctcatccaaagcagttgagtcccacaggttgagaaccactgacctatcacagggattttttttttttttttttgaggtagtgatgattcttgaacacatgtttttttttttttagttagctagttagttagttaggctccctctggtcatctccatccagatggatgtaggtcccgatatctctggaagcatttctttctttcctttttcttttttaaagatttatttattctatgactacactgtagctgtcttcagacacaccagaagagggcatccattacagatggctgtgagccaccatgtggctgctgggaatcgaacttgggacctctggaagagcatcccttgctcttaaccactgagccatctctccagtccctactctggaagcatttctaagccatgtgtcctccctttgctctcctgcccattctcctcttgctcactgcctaccccaactatggactccatctttactgccaatgtggctctgcttgtctattcgttgatgacagcttagagtatttccctctcttctggatttatagcagcaagtccttcagatttctactccttctattttagtcttctgctcaagactcagctcaaataaatctgtttatttccagaagctggcagaggctagtttggaagttaaatgttatcattcttttagcccactgaggcataactacttctcaaacatccatccagaaatacactactaagctttgtattttgcctttagaagaaaaaaaccatagtttcaagaccattcaagacgctaacataaatttatagttcatttctctccttacttatttgttattgtgcatcttaactgcagcattagagctatggtaagattttaaaaaggaggaataaaggattcaaaagcactcaccatgnnnnnnnnnnnnnnnnnnnnataatgtctcccaacttacctgttaacttctcatggcatttatagagctgagaactagaatagagttggaaagacatcttacaaacctcctgtgaatggaagctgattgtaccacaatgattgtctttcaggcaaccttgaccgaaatatacagtcggtgtcaaaggtattaccaagtgttccaagcagctaatgattggcttgacgatgcccaagaaatgttacagctggcaggcaatggcctggatgttgagagcgcagaggaaaacctcagaagtcatatggaatttttcaaaacagagggtcagttccacagcaacatggaggagctccgaggtcttgtggccaggctagacccactcattaaggccacaggaaaggaagaactggcacagaagatggcttccctggaaaagaggagtcaggggatcatccaggagtcccacacccagcgggacctcctgcagaggtatttggagtaggttcttgcataacagcagcatgctaatataatatatagtgacatacattggcatgtaaattcattttctctcttatcatcaggcatgtgggcagcagagctctgtgtagaaataactgggtttgcattgcttatttatgtatttctgttggactctttcaagatgtatggttcagtggcaagagtatcagaaagccagggagggggttatcgagttgatgaatgatgcagaaaagaagctgtcggagtttgcagtgttaaagacatcttccattcacgaagccgaagaaaagctgtcaaaacacaaggtcaggtttgttgtcgttattttagtgtctttctgtgttaattgcaacagtatttgtgatatgatgttttcagaatcacatctttaagtcttcatttccatcttgcttcctttggtgtgataaaggcctaataagcacatttcacaactgaagatgctcacatgaaatgcatagctaaggccccagtgataaatccaaagtgtctgcttctggtaaggtagggttgctttaacatggcaggaaagggctggggagatggctcagtgggtaaaagtgtttgctacacaagcctggcccctgactgcctgagtcacaccccctaaatccacataagaagcaagatattgaggcacaggttagtaagcctaccacccccaaagcaagagggagacagcaatgggagacactcctggaagctctaggaatcagtgcatcagcagaaaaccagagaaacatcctctgcaaaacaaggtagagagaactgactcataaaaactcatccttaactcctgcccatgtcctgccagccccccagaatgaatgaatggatgaatgaatgaatgagtaaacaaacaaacaaacaaaccttttaaagagcaactaatattatctcttgattaattgggctaaaataaaatccagaaattaattcctgaacacccctcatctagcatagcaacataagaaagactataacattccaaaatagcaaagtaaatttttgttgattttcagaaataaaaatattcatctcaagtagaaaataacttgtctatcataaataaataaatttcacctttcaaaataaatctaaaccccactctgataagtgtaactttaaagtagagttattaaaggaaacaaaatgtattcataattactaatttacttttgggacttttaaaaagatttatttgtttattttatgtatatgagtataccatcactcttttcagacacaccagaagaggacatcagattccaatacagatggttgtgagccaccatgtggttgctgggaattgaactcaggacctctggaagagcagtcagtgctcttaacagctgagccatctctccagccctacttttagttttttaagggcaggctttcaggtaacccaggctggccttaaactctccatgtagctgagtataccttgacctcctgaatctttctctccacctccccagctctaggcttatagacatgtaccatcacaactgcctgagaaacgtaaacttatacagaaatatttcttttgtgcaatagggctttagccaagtccacagaatttaaaagaaaaacaaatcaatgtttctctaaccccctctactcacccccaaccctacactaggctttagtgtctgtagttgactctttccatgagaaaattgtggctctggaggaaaaagcatcacaactagagcaaaccggaaacgatacaagcaaagcgaccctaagcaggtcgatgaccactgtctggcagcgctggacacgtctccgtgctgtggcccaggaccaggagaagattctggaagatgcagtagatgagtggaagcgcttgagcgctaaggtaactttcactacagattggcttaagtcgtgttttgtttcattacctggagattccctggagattagcgcatgtttgaaaaactggtgttttgcctttgcatatgttaggtttctgtgactgtgataaaacaccaggatcaaggcaacttatagaagaaggagtatattttggcttacagttctggagggttacattcccccaatagcagggaggcattgcagcaggcagcaggcaacggacagcaggcatggcagttggagcaacaagctaacagctcacatcttgaacctcatgcacaaagcagccagcataagctgggagtaggggaagactttggctctcaaagcctcgccacagtgacttacttcctcctgtaagcccacacctcttaaaccccctcaaaaaaggccatcatctggagatcaagtattaaaacactctagagtgaggggcagaggagtgaggcatttctcatgcagacagccacctgctgttcttgtgaaactctcattcttctttcagtttcatgaaaactaaactatgaagcagagtgttgtgtgcctggtacagtttagttccaagttaggatcaaatggcacagggagagtaatgtgcatgtgacagggagtggaaaaacccactacaggggacagaagaatgcatacaagggtcaggatgaagaaagccagggagattggaaaggtagggaagaatgggttccaaaaccaagtatgtatgaaaatcttataggggaatcggttcttttgtatgctaaatttaaaataactaagggccaactaaacgcttgagccaagtaaaggggctcgcgatagggggctgacgacccagtttgatcctaagaacccacagtgaagtgagagaatagactcctgaaagttgtcccatgttatctacatgtgtgttacatgtccagctgagttctcgcttcggtgcatgcctctcaagtgtgtgcacacacacatgcccacatgcacaaataataataaatattccaaaatgaatatataaatacatttttaagatgaaaattaagcaatgaaatttcaaaaggaaggcaagccaaggcgagtcctgtttgtttttaacctattttggaaaaagtacaaaatcttttttttctttgttgtaaaaataagaatttagctcatccctcaaatctctgtaaaatttcttccacccattaggtgttttagccatgtcttccttgtcacacacacacacacacacacacacacacacatgcacacacacacacacacacacacacacacacacgcacacgcacacaagccaactttgccttgataagatttggggatcaataatttaaacacagggtagggaaggtggtcttgtatgttaacaacagcatcttggttttaattttggaagtttgtggtttgtgtcatcatggttaatgatgcctttaagtgtggcacttggcagccttgccacattcttttcaatataattttgagcttcatacgatgtatgtttgttctaaggtcaaagaaaccactgaagtgatcaatcaactccaaggtagattacctggaagttcaacagagaaagcctccaaagcagagctcatgaccctccttgaaagtcacgacacatatttgatggatctggagagtcagcagctgaccctgggtgtgctacagcagcgagcgctaagcatgcttcaagatagagccttccctggaacggaggaagaggtgcccatccttcgggcaatcactgcgctgcaagaccagtgtctcaagtaattacacacctgttttgttcactatgacaatgggccttaactcggggacatatggttctcaggtgtggggggggggggttgctctatcacaccgttgcaaagcatgcagatctagtcctatctcttctactgctgggttttagtaattcttccattcttcataagacaagtatatatttgatgacagaaatattgtgcaatgagaagccccaggagagaggagccccgtaggtgataaggtacatgatgcacaagcacggtcatccaagttggatcttcagcacttacatttaaaaagaaagctaagaagctgaacatgatagcacatactgtaatgccagcagtggggattgctggccaggcagcttagcctgctccatagatactctgtctgcaaaacaaaacaaaaccaaaacaaacagataaaaaaaaaaaaaaaaaaaaaaaannnnnnnnnnnnnnnnnnnnnnnnnnnnnnnnnnnnnnnnnnnnnnnnnnnnnnnnnnnnnnnnnnnnnnnnnnnnnnnnnnnnnnnnnnnnnnnnnnnnnnnnnnnnnnnnnnnnnnnnnnnnnnnnnnnnnnnnnnnnnnnnnnnnnnnnnnnnnnnnnnnnnnnnnnnnnnnnnnnnnnnnnnnnnnnnnnnnnnnnnnnnnnnnnnnnnnnnnnnnnnnnnnnnnnnnnnnnnnnnnnnnnnnnnnnnnnnnnnnnnnnnnnnnnnnnnnnnnnnnnnnnnnnnnnnnnnnnnnnnnnnnnnnnnnnnnnnnnnnnnnnnnnnnnnnnnnnnnnnnnnnnnnnnnnnnnnnnnnnnnnnnnnnnnnnnnnnnnnnnnnnnnnnnnnnnnnnnnnnnnnnnnnnnnnnnnnnnnnnnnnnnnnnnnnnnnnnnnnnnnnnnnnnnnnnnnnnnnnnnnnnnnnnnnnnnnnnnnnnnnnnnnnnnnnnnnnnnnnnnnnnnnnnnnnnnnnnnnnnnnnnnnnnagagggagagagggagagagggagatgggggagagagggagggggagagagaggagagagagggggaggagaggggaagagagggaagagagggaagagagagagagagagagagaaagagaaagaaagagaggagagagggcagagacagtgacaagttaaacaaattgattgtttaccttcctgcactttaaagtattgataggtagccaggggaagcttaagtattgcaaagattgcaagagttgatcactcttcttgttattctgaccaaggcatcttaaggaaaggaaatgtttgttttgcttcacggtctgaggaggatacagtccatcttagcggagaagtatggtagatcacaaggctattaggctcattgcattcaggtcaggaaacagcacttaatggaggcaatcagtttgctttcttttgttctcccttttgtcttttctttccttctttctttctttttaattcatcaatcatcttgacacactcacttgtttcactgaaaatttccagatcagccagattcaattccttcaccttgaatgcaatggttcctatcaggcctgtttgccagctatgctgcaagtttccaatatcaaggttcagctgagaagctccaagctagacctgaaatgattggaggggaggtgacagagatccttcttttccttttaattcactctgggacccccgtgggatggtaccacccacatttaggagagggcatccacgttcagtttaacatctctgaaagcacccttacaaactcactcataagtgtgtttcccatataactctaagccctggtcaataaagatgaaccaccactgactctaatagactctaagcagaggcaaccagtctaggggggttggcaaagaaagtgtctcttctgcagctggagacaaagtgggtttgcatgacattgtggtggaatgacatagaaaaagcttagaaatgtcttgggtgggggtgtgaggagcggactcaacagataagaagctccaggcacagtgacacatacttctcatcccagtaggctgaggcaggaggattatgagtctgaagccagcctgactatatagtaagtccccaggttagacaaagtcctccagccactaagcaatatttaaaagctatatcacccattggtgatgtaggataatagaaataagaatgatacagaaatccaggcagttaagtttcttcattgacagtaaatctatgagaaagttcatcttgattatctagaactggcttgattcactacttgggccatagtggggagcatgtctttaaacaagttaattcctctaataagtaacattaccttatacatatctatattcaccactcttagttagtaatgatgttagggcaatctgataccatgtatagaaaagccttttaatccacttattcagatcagtcataacactgactttaatcttggtgacatgtccaaaacttgattctttctttaaaggctggcttctcacagccatacacattccaatgacacattcctttcaaatggtgatggcacagcaggcactatttgagcagattggaaagattagggaaagaatgtggagatctaggtttcctgcatagggaaatacatagccattgaggggcagggagcaaaggactctcacatttccagggataaattattcacctcccatgacgcaaattcttctgttatgcttgaaccttgctgtcactgaacaatatccaagagaactggaagtaattttaccagcctaaaacatactagatttccccatttctatgtctctcataaagctgtgtcacgcccaggagtgttctttctgcttcatttctgctttctccctctggtatttttgaagcatgcaggagaaagtgaagaatcatggcaagctggtaaagcaggagctccaagaacgggaagcagtggagactcgtattaactctgtgaagtcttgggttcaagaaacgaaggactatttagggaatccaacaatagagatcgacacacaactagaagaactgaaggtgctcctctgaatttgtcaaaatattgcctttgctttggttatccttgtgcacacttaatgaattgtgaattggaatttttaggcatgcattctatacacatggtatatgcaaggtataatatatattatttctctatgggattgtgtgcctgatgaaaggagacctactaaagttcatttcccttgcaaggtttttctgcaattttacctttaattgtaactgatgaaaaatcagtagctttatcactagatccataaaaataaataaatatgttccttatcaggcaccaagaattttcttatcttgcttttccttcctcagagactcctagctgaagccaccagccaccaagagagcattgagaaaattgcagaagaacagaagaataagtacttgggtctctacactgtcttaccatctgaaatctccctccagctagctgaagttgcgttggacctaaagatccatgatcaggtaaacttataacagagagagagaaagagagagaggggggagaagaagaaggaggaggagggggaggggaggggaagaaggggaagaagaaggggaaggggaagaagggaagagaagagagaagagaagagagaagagagaagagaagagaagcagagagacagacagagacagatggacagggattggggagggctttctattctttccagagttagtcctataagatgtatcttggtttgcacaatcatatttcccaggaagtcaaggtaaataaaggaccactataaaacaattagcattcaaatgaccacagctctgagcagtaagtaatgccatacagatgttcagtttgtttttctcatcactgtgacaagaaagctgacagaagcatggcagggaagaagggtttgcttggtcctcggggaggacattcactgtaccatgattttgagcaaaacaaagacttgatgcctgtttttaaatattgttttattgtgaaaccggctgaatctttaacattgggagagttgccaggaaggataagttaactagttagggtctttgaaaagtcatttaggtgactggagggatggctcagtggttaaggaaagcacctgctgctcttgcagaggacctgagcatcattcccagggcccacgtcaggaagctacaactccagcttcagggatttgggccccgtcctctggactccacggttagtccatgcacacatgcacacatacactcacctaagttaaagtgaatcactttttaaaacatcaagtctcaccaggtggtggtggcgcaagcctttgatcctagtgcccaggaggcaaagagacagacgatctctgtgagttctagtacagccaaggatacacaaaataaaataaaataaaataaaatacaaccagacaaaaaaattaagttaaaaacatttaataattctttacattttgtctgtttgcttgctagaggtgttctgtgcaaatctggttacgttggtcttcaagtcaagatgatacaggccaggacagcactaaagcagggctgctgctctgaggattccaaggacctttcttgtagctaaagaaagctatttgttatttatttatttaacttattatacaggctcactattgtaaaaatcatgatcctcatttacctgcctcaggctccggagtgttaggattataggtgtgtatcagcacacctggttatatttgttctcctgactaccttttttcccagaatttttgaacttgctataaatcaaatcaaacccattgtttgtgattgtgtgtgtgttgtttgtgtgtgttgtgtgtgtgtgtgtgtgtgtgttgtgtgtgtgtgtgtgtgtgtgtgtgcgcgcgcgcgcgtgtgcattgtgtgttgtgtatgtgtgatgttgtgtgtgggcgtgtatgggtatggtggtgtgtgtggtgtatggtgtgtgtgtgtatgtttgtgtatgtgtgttgtatgtgtatgatgctgtgtgtgtgtgttgtgtatgtgtgtttattgctgggactaaacctatgacttttcatagctgttggacagtcactctaccactgaaccatactgtaagtcagttttggagcctcctctctcactgcattcatttcctgctttgttgttatgtggtaggaatcttactgaaagttaagaaatcagtgtccctttcagacacgttgaaaagcaacagtccatatgcctacaagtattggtggtgaggtttctatttcacaaagaaaaaatatcttaggggatgtcaagaagctgggcaagcacttgctgcgaagttcagtcaccagaactcccannnnnnnnnnnnnnnnnnnnnnnnnnnnnnnnnnnnnnnnnnnnnnnnnnnnnnnnnnnnnnnnnnnnnnnnnnnnnnnnnnnnnnnnnnnnnnnnnnnnnnnnnnnnnnnnnnnnnnnnnnnnnnnnnnnnnnnnnnnnnnnnnnnnnnnnnnnnnnnnnnnnnnnnnnnnnnnnnnnnnnnnnnnnnnnnnnnnnnnnnnnnnnnnnnnnnnnnnnnnnnnnnnnnnnnnnnnnnnnnnnnnnnnnnnnnnnnnnnnnnnnnnnnnnnnnnnnnnnnnnnnnnnnnnnnnnnnnnnnnnnnnnnnnnnnnnnnnnnnnnnnnnnnnnnnnnnnnnnnnnnnnnnnnnnnnnnnnnnnnnnnnnnnnnnnnnnnnnnnnnnnnnnnnnnnnnnnncacagtcaatgtgcaacgctactgcgagtaaatcagcctcaaagcgttatacctgtctcctctaaaacgtattaaagtatctatttattcctgtgtgtgtgtgtgggaagagagagagagagagagagagagagagagagagagagagagggagagggagagagagagagagagagagagagagagagagagagagagagagcatgtgtatgcatgcatgcgtaggcattcacatccatatgtgtgcttgtgcacagatagaggctggaagaaagcatccagtatcctcctttatcactccccatctgtccttttgaggcagggtctcttcctgaatacagggatcttgctgtctccttgagggtggaagtcagtaatctcagccatcctcctgtccctgtactccatgtacagacaggtgcagagcacccagctcattacctggattctgagattccaagtctggtcctcacagttattcaagcactttggaaccttgagccaacactgcagcccctccacccattttcaggaagcccatcagtatcaacacagcgctggccaccttctaagtgactagtctgcatcatttgagagttttgatatctctcatcagatttcaactgtcagttttgatgtttcccttgattgtttagatccaagagaaggtacaagaaattgaggagggcaaggccatgagccaggagttcagctgcaagatccagaaggtcaccaaagacctcacaaccattctaacaaagctgaaagccaaaactgatgatctagttcatgctaaggctgaacacaaggtaaggatgagggaggaatagaaagcaaggggctccttcattgggggccctgtgttccatcctatagatgactgtgagcatccacttctgtatttgccaggcactggcatagcctcacaccagacattagggtcctttcagcaaaatcttgctggcatatgcaatagtgtctgggtttagtggctgattatgggatgaatcccagggtggggtagtctctggggagggtatagggaacttttcggatagcatttgaaacgtaaataaagaaaacatctaataaaaaataattaaatttttaaaaaaggagaaagaaagaagagagagagagagagagagagagagagagagagagagagagaaagaaagaaagaaagaaagaaagaaagaaagaaagaaagaaaggcacctctgactgcaggacagactgctgctgtattcatggtatctggttatgtagggttcttagcaatccactaaaatccaggggtaataacaccagtctattcatgcaatgtatcattatgatagaaataatagatatacatgtatgtatagtagagattcatgattatctcgatgtaccaatttataaatttcaaggtttgccgagcctgtttgcttgcaccctgtctgtgagctaaacagcccagatgcattgggtagggcagaaggaaaaaccagttctctcatgggaaacagacaggaggctcaacacaccctcttcggctgctctctgacccaagaaatagaaacagctaaatcttggtagcatggttgtttatgatatttgcctttaatgagaaccatctaaagtataatccttctgatcttcgagaacccctgagaaagtatcatgtgtaatcatttcttattttgtgttgatggccatatagatgctgggggaagagttagacggctgcaattccaagctgatggagttagatgctgctatacagacgttctcagaacggcacagccagctgggccagccgctggccaagaagataggaaagctgactgaactccatcagcaaaccatcaggcaggctgagaaccggctgtccaagctcaaccaggtgtgcatgtgctccagccgcacaaccagagccctttaagtagacattgtaaccatttctcctctgtaaataaatgaaaaaggcagtgctagcaatgatggatgcggttttgctatagcttatttcttacagtgtctctgtgatttatatataaacctatatctgtttcataacaaactgtattatactttgacagagtttcatatgaataggcttggctgtataaacttcataaactggagatgtaattgtaaaaaaaaaatccatccataaataagttttataaaatcagcttaagacagattcaaatatttttccaacatgtttttcttatctctgaatttcacatcatgtaccccatcatgcttaccttctggtctgctccccaaacttttaagccccccccaaaaaaaaaacaagaagaaaaataagaacaaaacaaacaaacaagtccaatttgtgttacccatatactcactggagcaaggtcaaactctccatgaccaagctccttagagaaaattgagtctccctacccccactgcaagctatcaagtacggagagctacaagcgcgtcattatcacaatgttagagttctcttcttcctgtctaggctgtcactttttggggtagtggtgtggagatagtggttatatacctactcatatacatcatcttgatttttttgattatagattggcctttgcaactctaccaagcattaatcttgccatcaggttaaagttaaaatgagtagtccagcatttcctttacctttttttcatatagcctaagcagacctcacactcactaggtatagccagtgagggccttgatctccatctcccaaggactgggataacaggcaggcacagcactttcctactgggcccagcttaggagctaatggttgtgacttacagtgggtgctgagagcttgcatgatggtgtccctgccttggtccctcctttacccagtgggacgtggatagaagggataaaaagagtaagatgagaatgaacagccaggaaaagagaaataactcaagcatatcacggaggacttggatttgtaccctgaagtcactgggaaatccttaacagattccctataggcaagtgacttcccagggtcccttttgatatcacagttgtaagtaccagcctctgggatggttggatccaaagacctgaatagggttcaatcccgctgacaagacaggatttacatccatctgagtgtgaatggcttttacaggcgttatcccacatggaagagtacaatgaaatgctcgagactgttcggaaatggatcgagaaagctaaagtcttggttcatggaaacatcgcctggaattcagcaagccagctccaggaacagtacatcttgcaccaggtaaatttcagggaaaaaaacaaagttaagagtaaaaacagtcagtctgactgggttagaccaacagacaattttgtaaaataccagataggaagaatgctcgggccccatccgggtgactcagtaggtaatcaccgccaagtctggtggtgactgcagtttgattcccgggtcctacatggcggaaggagagaactgactcctgcaagttgtcctctcatccgtccctaggcactgtggcatgtatgtgcatatatatatttacatacacacatacatacatacatatacatacatgtatacatatatatgtatatatatacatacatgtatatatatgtgtatatatatacacacacacatatatatatatatgcatatatatgagagagagagggagaaagagagagaggctgacttgctgttctggattgatcaaaagtagctaaggatgacagttcatgagactgtatacaaacatatatatatatatatatatatatatatatatatatatatatatacatacatatactctgttttccttataaacgtgtttctctgagcctgaaagcattcctccctacccctgtggcacttgtgatttgtgtgttattgttgccgcttttgttgtagacccttctttgggagatgcagggaattctttcataggaaaagacacaggggagcgtagagagattagaagcatcacaccctggaaggaggagggttaagacaagctctaccaactggtaccctgtgacttggaacaaaatactttgtctctgggttctgccttctcacccgtaatatgggaatgcccagtagtgttcctgtgtcagttgcctgggagcaaacatccagcacttccaggtacatgctgatgctccaggcaggccctgcttcctctaggccacagccagggctgagtcatgtggcttactcagaaggtcagagcgctgagagcagatcctatatccacaccccagagggacacattacttcatttcctctgaacttaggagacaaaaatattcctttttattttggccatcctctccggaaattatctcacccttctagtaagttacagttgacttaaatgcacatttctaacagatcttgccacaaaatacaggctggcttttatttaggttgtatgggtgtatttccccataggacttatcttttaaataaacttccctttttccttttccccgaggtggttctggatattgtttcctcctggaatgtttccatggctcgaattccagcccctatgatctctgtcctcttcccagtcacacacactcctcccagacacagacatctgtacctctcagacgcctggatcgtttgctctgtgtgtgtgcttagacgccaacagaccagacttcctttacaaaccagctggtaatcaatggcaatacaactaacttctaggactctgaagatgcagttgtaagaacagaaaagataaagggaattttaactgtcaagataataccacttaaaaaaaaaaaaaccctgctgataattcagtaaaatcatttgaaaagcaattacagtaatataagctggcattttatttcctgttcattttgcttcctggattccttaactggggctgtaatccaaaatgtaggaaatatttaaaatgatattaataactgtaggaggattttattatttatgtacttatgtatgtatatatgtatttgttttgtatgtgagagaggaagtaaggagggaaggaagaagatgggggagggagggggagggaggatgagagttcaggcacacatgcatgtaacagtcagagtaaaccttcaggaagagagtccattctgtcccactgtaggattctgggatcagacgtgggtcatcaagctcacccagcaagcccgatgacctgctaactgatggcagtgtgatggaactgtaaagaaaatttcaatgttagatcatgcttttctaagatatttttgcacattgtggagcataatgtaagctttagaaaaaaaaaaaaaagtcatgaagattttcattgtagtttcagaaagcagacccagcagtggaaagcaggttgctggagtagaagggggatgcttctaccctgcagcagacaaggacaggcctctctctcattgaagagggacaaaggatgtactagagagagatagcacagcccagatcagacagttctatgtgtggttgacattagtgttcatgacacaaactgctgggtggcttgactgaatccttaaccaaagcaagcaagcaaccttagactgctctgcttgtctgctgcaaagtccaggagggaactcatcccagagggtccccgcccttgtgtttccaccaggaagcacagatgcctgggtttacccttcgacaaatgcagtataagaaaacccgtgtgttcaaatgtccaatgaaagagggaaatcaggagacacattatgctcttaactcctaaaaatgcccatatgtactagcaatgacatcttacagttttcctttcaggcatatacaatctgtagcccacagtctacacacatcccagggtagctatgaacatatttgtcagtgagagttgtgtcacggtgtcacgagtttggacaaccctgccttggacgtgatataatagagtatttttctttttctttttttttaaattggacatttttctttatttacatttcaaacgtttcccctttccaggtctccccttcaaaaacccccattccatccctcctccctctgcctctatgagggtgccccctacccacccactcctgtcttcctgccctggcattttgctatgctggggcatcaaacctcctcaggcccaagggctactcctctcactgatgtccaacaaggccatcctctgccacatatgtggccggagccatgggtccctccatgtgtattcttaggttggtggtgcagtccccaggagctcaggagggtctggcctgttgataatgttgctccctccatggggctgcaaacccaggcaaatggatatttttcttatatttatatatattacattcactgtgaaaagaaaattgcttttcatatctaaaaataatctaacagagtaacatacccctgttttttatattcctcatatatctccccaactgcacattccgtgctccccaacttctgtgccctgcatacaccatctcctcagtacaaagtgtctttcccttcctcctcatctgttaatgtgctgatatctttcttgaacccagtaggacccttatctcaacctaccagcaagttgtcccacatttgggttgagttaccctttaatacgtggctaccctttcattttcttctccatattccaatgcacgtgtctgtatatgtttgttgtctgtttgtattgttctactgctgtaagtcccagcaggcactgggctgagtgatgagggggggactacactcccctcaacattgcaagtagccttttcctccctgtcttactttgaataagtaagcaaaggtttttgtttgcaaaacttgtgcttttctttgcatcttccagcattcagatcttagttgtataacctaagagctgaataggccttctttagtgcaaacgtgggaaaaggcaggatccaagcagagatgtgatcaagacacaatgtgccgaagcatcaccaccgctggctgatagctccgtgtcctgccacaaggcgaggcagcctgggtgtgagagagcaggaatccttaagtcccatactcatgaacaagtggccttagcaagttataaagattcctggacttgaccttgttgtctatgtaatgaggatgacaatgtatatgtagcctgtgagtggactcataggggtgagatggccaaacattgtaccatgttcatagttctttttgatcttttcctagtctattgggtctttctactcctctatacatatctgtattccccctacccccgtccctgcctgcatatccgtttcacaaatacaaacactttactctagacactgttagaagaatctggcgaaattgacagtgacctggaagcaatggctgagaaagtgcaacaccttgccaacgtgtactgcacaggaaagttatcacagcaagtgacacagtttggacgggagatggaggagttacggcaggcgatcagagttcgtttgaggaacctccaagatgcagccaaggtaaaacaaaacacaacacaacaaaacaaaacaaaacaaaacaacctggcgtgctgtcccggggagaaagcgctcacccatggtgagatagtttcttgaatatgatgcagttcttcggttatgactttgaactttaaatgttctgatgttcactggggtttgttctccaggacatgaaaaagtttgaaggcgagctaagaaacttgcaggtggctttggaacaagcccagacaattctgacttctccagaagtcgggcgccgtagtctcaaggagcagctgtgccatcggcaggtacgcaaaggaaccgagggaggcctggggaatggctcagctttcacagttgttgtcttacaaactcagcattggatcccaagagaactcacactaaaaacctgggcgtggccgatccaagcctcaggagggaacagtaggtagacaagaccaaccaggtctacgtgagttcaaggccagctagactgacatagtgagatcctctatcagaaaacaaaactagtcaggatgacatgtgcttaaaatctcagtgcagaggagaatgaaattggcaggtccctggtgcttacttggcaagctctggtccaacaaaagatcatgtcttaaaattaaaaatgtaaacagctgttgaataatggtaggtgtgtttgctgtcctctgaccttcttatgtatacatatatgtacaatcctcattttgcacctgccattaggaactcaaaggcacatgtgcatttacccacacacacaaacacagacatgcacatgtaatactttaggatgaatggggctaggggtttacattttaaaaatagccccaagaaacatgttttctaagcccagtgatagtcttaacatggatttgttgtttagaatatatcttccttgcaaactgtattgacccacattgtcctggtagctacaattcaggaaatgtctttgtttatgtaatacatgataaaattaccaagggcttaaactgtaacatggcccctttcagcatctgctgtctgagatggagtcactgaagccaaagatgcaagccgtacagctctgccagagtgctctccggatccctgaggacgtggtcgccagcttgcctctgtgccacgctgccctgcggctgcaagaggaagccagtcagctgcagcacacagccatccaacagtgcaacatcatgcaggcaggtgcaactgtgcatcccgttcagcccgggggcccacgctggcagagcaaaagcacatgagtcatgggctgcttttcttagcattgtgtgggctcagccatcaaaacacccagagtgctaaatttgacagtctgttgtacttatataaaatcaagagattaagactctattatgtggatcatccacacaggaccggggaaagagctctaaaaattacctttaaatgaaaattatcttttggtgattttttttaaatgaatgattcatacacattagttttgtatgtggtcatatatgtatctgaaaagaatctagagcctggtgatatgggcttgcaaagtttgtattacacaacagcattcatatgtcatccaatttgtgtattttctggcctaagaaggacatccaagcacagctcttaatcttttgaggtaagaagagaaaaataattcccatgaagaaataatgctacttactatatcttttcttgtaagaagtattcccctgattgatacatagttatatctcattaaaacaatgcctgctcatttgatcaaccacccttgatcactcattaccttgtaatttgtttgacatcagagccccaaggctactggccatgcttaattagtattatctggaactggaactcttggctggtgtcttgttattcaacattgttttaaaatttggtttgcattttagtgtgtgatacatgtacataatagatagtatgggtgtgtatatgtatcttaggtttttactgctgtgaacagacaccatgaccaaggcaacgcttttgttgttgttgttgttgttgttgttgttgttgttgtttttgttttttgagacagggtttctctgtgtagccctggttgtcctggaactcactttgtagaccaggctggcctcaaactcagaaatctgtctgcctctgcctcctccctagtgctgggatcaaaggtgtgcaccaccacgccctgcccaaggcaactcttataaaggacaaacacttaattggggctggcttacaggttcagaggttcagtccattatcatcaaggcaggattatggcaggcagatatgaagctgaaggagctgagagaacatctaattctgaaggcaaactggagaagactgtctcccatatggataggaggaggttcccagagcccacacccacaatgacatacttcctctaacaaagccacgcctactccaacaaggccacacctcccaacagtgccactccctgggccaagcatattcaaactaccacaatgtgcatgagggttcatgtacatgtatgagggttcatgtacatgcatgtgggttcatgtatgtgggttcatgtacatgcctgtgaacgctaagttttcaacagaatcttctgttgaatccagaactagtagatttccttaagctccagggaccctccttgtccttgatccctcacctctcaatgctggttacagatgtggctgtttgctttaatatttggaatttgagttcagatccttaaacttgtgtgatgggcactttaccatctgaggtattttcccaacccatcagtcagtatctctcatacagagagaaggaaggcttttgtcctgacagctcatcttcaggacagtcttaagaaggcagaccagagagaatcctaacagctcacctattttgatcccattaataattctattataatctttcaaaaagttgatggagctgagtgaaagttgttcagttgcaccatctgaaggactttatccatctctttttgacttcctggacctggggaaaagaaggtaatgttagtgggaaagccacccagtgactgatagaaaaaacatagtctcatttttcccccaaaggaggctgtggtgcagtatgaacagtacaagcaggaaatgaagcatctccagcagctgatagaagaggcacacagagagatcgaggacaaacccgtggccaccagtaacatccaggagctacaggcacagatctctctgcacgaggtgagacagaagggcaggcaaagcaagacactgatcactggaaactggtttcatttagagcagtggttctcaaccttcctaatgctgtgatactttaatacagttcctcttgttgtggtgacccccaaccataaaattattttcactgctacttcatagctgtcattttgctactgttaagaatcatgatgtaaatatctgtgtactgttacaaatcatgacataaccatctgtggttttaaatggccttaggtaaccccacaaaagggtcactggtctctcaaagtggtagagacccacagattgaaaactataggtttagggatgggaagagaagaactcttagctttgtgagagatctgctttcagtcttgcacatctgttacaggatatttgaacctgtttctagttagggtgtagctcatcccttagcacatactgttcatcccttctgctggagtacagacacatccttagtactctcccttaatcacaaacaatgaaggtaagtatcatttgtagaaggaagtgcccatgtttgaaagtgatgtctaattgagtggcagaaaaaatgacaaatcagagatgaatttgacagaataggatatgcccacttctcatgaggaaagagatgaaagggaagctactttgtagtagtagtaagccggcctgaggcctacatgaaccgggtatttctggaaggcaggctggggctgaaagagagagagactagactgcgagaaaagaatgaagccaagacaagttttctctgatcaaggcgttactaagagaatgtgcttataaaagggtggggggggcatcccccaccaatccattcttggtgcctagagccagcctgtaggcaaagtgcaggataggatgtgtctctgaatgtcccaagggtctctcagcaggtagcagagtctcagagaagagcagaggtagttgacataataatatagccatctaaattggaaggctacaccctaggtgatctcatattcagtggcagcaaagtctgaatcagcctgcttcaaggctgagggatgctacactacttgaagtagagacagaaagtacaggaagaagagggtacatacagtacaggaatagagtccatggagaacagtgcagtagagttgagagacagcagaacagcagagagagggaggaggaggcagttttattgggaaagttttacagagacagactgaagaaagaacaagcttgacacaggtaaagacagcactagcaagaaaacaagaaagagctggaagattagaaaacattgctagagttcatttgtggtaaagcagaacaattcaaaggcctaagagaaaagccagattgaataagtcagctgggagaggagtttgaggcagaacacctgaggtgaaccagcagcaagagttcagaaagaacaagaaaggctgagcttagtgagcagcaaatctcacaggctgaaaacattttatggctagattagattgtatagaggctggaagcttccaggactaggcctaggttaacagagggaggcagcaagcctccaagaggataattacagcaggcaaataagaggtacttcaacacacagcacttcagctgtttctgcattttcaaggtgattcttgctgctcagtaatacaggtatttcccatgtatttcccattctgcagcctctatgtgctatttgtggaatgttccactgagaatcccatgcatggaaatagattagtgcaccaaacagttaattcatgaaaatagtctaatccttgatttctaaagccttttaagaaacaaccaggtccaatgctttgtggtggtgttggcctttttacaaacaaagggtgacttcatgttacagggaaaagcacttctgcctgtcgtccactgcttagactctttcactgagatcaagaattatcaaggttctttgcctcacaggtgtctccttgtcttttctgcatcaccttacatcttcctgaatctcaggtctcacagctccagagtgacaaagcccagtgatatttagcagcaaattctgtccctggcccgtcatttcctattaggtcaattctctctcccttgggggctgactcatagctccatacattgtgatgggtgacacagagagggttatttagttcttcatgccaaggacagacgttatgttttgctttctatctgattttttttttattacctctatcatatcttcctggcctcgatgtgacagtaaacttctcagagattgaactgttcccctgaagtgtgaaaatgtcatgcctgctttccacatataagtaaacaatttcttcagtttaccagcatagtacatttctatggtttgcaaaaccaatattctttttttattagatattttctttgtttacatttcaaatgccatctgatttcctagtttcccctctgaaaatcccctatcctttcccccctcccgtgctccccaacccacctactcctacttcctggtcctggaattcccctgtattggggcatagaaacttcacaggaccaagggtctctcctcccattgatgaccgactaggccatcctctg

SEQ ID NO: 2486 - DNA, 3916 bp, Mus musculus
gtctaatgcagaaagcacagctatccacttggaagctttgaagaagctagccttggccttgcaagaggaaatgtatgccatcgatgacctgaaagactgcaaacagaaactgatagagcagctgggtctcgatgacagagaactggtgagggaacagaccagtcacctcgagcaacggtggtttcagctccaggaccttgtcaaaaggaaaatccaggtgtcagtcaccaacttggaggaattaaatgtgatccaatccagattccaggagctgatggagtgggccgaagagcagcagcctaacattgtggaggccttgaagcagagcccacctcctggcatggctcagcacctcctcatggaccacctggccatctgcagtgagctggaagccaaacaggtgctcctgaagtccctgatgaaggacgcagatcgtgtgatggctgacctcggcctcaatgagcggaaggtgatccaaaaggcgctctctgaggctcagaagcatgtgagttgtctcagcgacctagtgggccagcgaagaaagtacttgaataaggccttgtctgagaaaacccagtttctcatggcagtctttcaggccaccagccaaatccagcaacatgagcgaaagatcgtattccgggaatatatctgcctacttccagatgacgtgagcaaacaggtcaaaacatgtaagactgcccaggccagcctcaagacttaccagaatgaggtcactggactttgtgcccagggtcgggaattgatgaagggaataacaaagcaagaacaggaggaggtgctgggaaagctgcaggagttacagactgtctatgacaccgtcctgcaaaaatgcagtcaccggttgcaagagctagagaagagtctggtctctagaaagcattttaaggaagattttgataaagcctgccactggcttaaacaagcagatattgtcacttttcctgagatcaatctcatgaacgagaagactgagctccacgctcaactggacaaataccaaagcattctggaacaatctcctgagtatgaaaaccttctgctcacgctgcagacgactgggcaggccatgctaccgtcgctaaatgaagttgatcactcgtacctaagtgaaaaactcagtgctctgccccaacagttcaatgtcatcgtcgccttggctaaggataaattctataaaacccaggaagcaattctggcccgaaaggaatatacttctttgatcgagttgacaacccagtctctgggtgacctggaagaccagttcctgaagatgaggaaaatgccttcagacctgatagttgaggagagtgtgtctcttcaacagagctgcagtgcccttctgggtgaagtggtagcccttggggaagctgtgaatgaactgaaccagaaaaaggagagttttcgcagcaccggtcagccttggcagccagagaagatgcttcagctggccaccctatatcataggctgaagcggcaagcagagcaaagggtcagtttcttagaagacaccaccagcgtttacaaagagcatgcacagatgtgccggcagctagagagtcagctggaagtcgtgaaaagagagcaggccaaagtgaacgaggaaaccctgcctgcagaggagaagctcaaggtgtaccactcgctggcaggcagtctgcaggactcggggattctgctcaaacgagtggccacgcacctagaagatctttctccacatctcgatcccacggcttatgagaaagccaagagtcaggtccagtcctggcaggaggagctaaaacagatgacgtctgacgtcggggagctggtgacagaatgcgaaagcaggatggtacagagcatagacttccagactgagatgagccgttccctagactggcttcggagggtgaaggcagagctcagtgggccagtgtgtcttgacctcagcctccaggacatccaggaggagatcagaaagatccagatccaccaggaggaggtcttgtccagcctgaggataatgagtgctttgagtcacaaggagcaggagaagttcacgaaagccaaggagctgatttcggcagatctggagcacacgctggctgagctccaggagctagatggagatgtgcaggaagcgctgcgcacccggcaggcaaccttgaccgaaatatacagtcggtgtcaaaggtattaccaagtgttccaagcagctaatgattggcttgacgatgcccaagaaatgttacagctggcaggcaatggcctggatgttgagagcgcagaggaaaacctcagaagtcatatggaatttttcaaaacagagggtcagttccacagcaacatggaggagctccgaggtcttgtggccaggctagacccactcattaaggccacaggaaaggaagaactggcacagaagatggcttccctggaaaagaggagtcaggggatcatccaggagtcccacacccagcgggacctcctgcagagatgtatggttcagtggcaagagtatcagaaagccagggagggggttatcgagttgatgaatgatgcagaaaagaagctgtcggagtttgcagtgttaaagacatcttccattcacgaagccgaagaaaagctgtcaaaacacaaggctttagtgtctgtagttgactctttccatgagaaaattgtggctctggaggaaaaagcatcacaactagagcaaaccggaaacgatacaagcaaagcgaccctaagcaggtcgatgaccactgtctggcagcgctggacacgtctccgtgctgtggcccaggaccaggagaagattctggaagatgcagtagatgagtggaagcgcttgagcgctaaggtcaaagaaaccactgaagtgatcaatcaactccaaggtagattacctggaagttcaacagagaaagcctccaaagcagagctcatgaccctccttgaaagtcacgacacatatttgatggatctggagagtcagcagctgaccctgggtgtgctacagcagcgagcgctaagcatgcttcaagatagagccttccctggaacggaggaagaggtgcccatccttcgggcaatcactgcgctgcaagaccagtgtctcaacatgcaggagaaagtgaagaatcatggcaagctggtaaagcaggagctccaagaacgggaagcagtggagactcgtattaactctgtgaagtcttgggttcaagaaacgaaggactatttagggaatccaacaatagagatcgacacacaactagaagaactgaagagactcctagctgaagccaccagccaccaagagagcattgagaaaattgcagaagaacagaagaataagtacttgggtctctacactgtcttaccatctgaaatctccctccagctagctgaagttgcgttggacctaaagatccatgatcagatccaagagaaggtacaagaaattgaggagggcaaggccatgagccaggagttcagctgcaagatccagaaggtcaccaaagacctcacaaccattctaacaaagctgaaagccaaaactgatgatctagttcatgctaaggctgaacacaagatgctgggggaagagttagacggctgcaattccaagctgatggagttagatgctgctatacagacgttctcagaacggcacagccagctgggccagccgctggccaagaagataggaaagctgactgaactccatcagcaaaccatcaggcaggctgagaaccggctgtccaagctcaaccaggcgttatcccacatggaagagtacaatgaaatgctcgagactgttcggaaatggatcgagaaagctaaagtcttggttcatggaaacatcgcctggaattcagcaagccagctccaggaacagtacatcttgcaccag

SEQ ID NO: 2487 - protein, 1285 aa, Mus musculus
SNAESTAIHLEALKKLALQEEMYAIDDLKDCKQKLIEQLGLDDRELVREQTSHLEQRWFQLQDLVKRKIQVSVTNLEELNVIQSRFQELMEWAEEQQPNIVEALKQSPPPGMAQHLLMDHLAICSELEAKQVLLKSLMKDADRVMADLQERKVIQKALSEAQKHVSCLSDLVGQRRKYLNKALSEKTQFLMAVFQATSQIQQHERKIVFREYICLLPDDVSKQVKTCKTAQASLKTYQNEVTGLCAQGRELMKGITKQEQEEVLGKLQELQTVYDTVLQKCSHRLQELEKSLVSRKHFKEDFDKACHWLKQADIVTFPEINLMNEKTELHAQLDKYQSIQSPEYENLLLTLQTTGQAMLPSLNEVDHSYLSEKLSALPQQFNVIVAKDKFYKTQEAILARKEYTSLIELTTQSLGDLEDQFLKMRKMPSDLIVEESVSLQQSCSALLGEVVGEAVNELNQKKESFRSTGQPWQPEKMLQLATLYHRLKRQAEQRVSFLEDTTSVYKEHAQMCRQLESQLEVVKREQAKVNEETLPAEEKLKVYHSLAGSLQDSGILLKRVATHLEDLSPHLDPTAYEKAKSQVQSWQEELKQMTSDVGELVTECESRMVQSIDFQTEMSRSLDWLRRVKAELSGPVCLDLSLQDIQEEIRKIQIHQEEVLSSLRIMSALSHKEQEKFTKAKELISADLEHTLAELQELDGDVQEALRTRQATLTEIYSRCQRYYQVFQAANDWLDDAQEMLQLAGNGLDVESAEENLRSHMEFFKTEGQFHSNMEELRGLVARLDPLIKATGKEELAQKMASLEKRSQGIIQESHTQRDLLQRCMVQWQEYQKAREGVIELMNDAEKKLSEFAVLKTSSIHEAEEKLSKHKALVSVVDSFHEKIVEEKASQLEQTGNDTSKATLSRSMTTVWQRWTRLRAVAQDQEKIDAVDEWKRLSAKVKETTEVINQLQGRLPGSSTEKASKAELMTLLESHDTYLMDLESQQLTLGVLQQRALSMLQDRAFPGTEEEVPILRAITALQDQCLNMQEKVKNHGKLVKQELQEREAVETRINSVKSWVQETKDYLGNPTIEIDTQLEELKRLLAEATSHQESIEKIAEEQKNKYLGTVLPSEISLQLAEVDLKIHDQIQEKVQEIEEGKAMSQEFSCKIQKVTKDLTTILTKLKAKTDDLVHAKAEHKMLGEELDGCNSKLMELDAAIQTFSHSQLGQPLAKKIGKLTELHQQTIRQAENRLSKLNQALSHMEEYNEMLETVRKWIEKAKVLVHGNIAWNSASQLQEQYILHQ

SEQ ID NO: 2488 - DNA, 515127 bp, Homo sapiens
cggccgccggccgcagcgggctgagattgttgtcctctgtcaccagggcggctgggctcccgcagtcctgcagaccgcgcccgatcccggcgacagggcgggcggacagccgcgcatccccggggtcccgccgagcctgggcgcagagagccgggaggaagcgttcgctcgcttcgccttgctgctgggaaactgaacgaggccgagagagaaggtaaaaggaaagacagagactgggagacagggagagacagagacagggagaggagagagaggtgcaagacgaacacattgcagacaaattgtcagcaagtttgtgcctgcacgctggggctctgcgtgcttgatgggagggggtggtggcagtgatgtgtgtacgtgtgcgatactcatagataaggagactaggaggttggggagcctctttgcatctcgtacgtagatgtccctattaatatccccctctctgagttgtcatttccgcttgtggcacatctcctgggctccaatggtgcagaagcaaaaggcagccagcctcttattgtgatggtcggtactgttgctactatcagatgggagaggtagggcgttgaacagattctaggagcctcccttcctccaccccctgactattttaggaagggctgggggagggaaatggcttgaaggctgcgcggaggccctggcgcgtcagactccagcggcgctgtcatggtgcagttgcttcccggcagagcctgcactagagggcaagagaactttcgtctcctctttataaagatacgtttcacatagagagatcttgcattgctggcggaggagttctgggaaatggtggtgcacaggcggccaggtgcatcccaacgggcaggcatccgtgcaaaacgaagcagccatcagccgcacaggaagaagccccttgggaaggcaggctgggtgtgctgactgggatcccagactttggatgctggaagttctgcccccttccgtaaatagagtcaggtccagcccagagggaaatatcagcaatgaagccttagcatcccacaatgttcatttctgagcttttcgttttggggtggaaaacttgtatctgaaatgttcctgtgaatgttaagaaagttaaaaatgaattatttttctcttctttaatgcccatccattttttgtcttcatctgagaatgactttcctaaagacaacattcgtatacagaagccagacctatgcaagagaaagtataataattttcaatgaggcaaaggtcattaatatgacctacatcttcataaaatgcgaatttaatcacgagtcatgacgattgttctttgagaggctttttattccccatggtgaaaaaagatttgtagtatggctaaaaagttcctgatatcaccggaacagtgtgacaaaatacatatctattttttcttttctgttcattactttgtggcagatttagaacaaaatgtgagagatctatactaacttaatatgtttcatgctgaagattaagaaacagcttcagactgacccagataacaatatttgctaggctttggaaatatttgcctagctcttattttatagtctcactttcatctttctgaactaatgattttcacaaactggttttcttctgtcctcattgacctcatttaagaactcttttttacttgagtccttcctgccagggagtggagattggaaaaagctagtttgccatttaaaaatgttcaagaattgtttggtgctgcactgggcctactttctgataactatgctgcacacacagcatcttggaaatgaaaggaggtgtgactgtcacaggatgtaggaagcccataactgggcaaggttggtggcattttcacaactccagctctagctactgcagccacaccctgtggtctgaatgtgacaggcatgcagggcccaaacgcctctgcgaggtcctctgtgtgtctcctcttaaatgtgtacttctttgtggtctaatctaacgagaactaatgtttggcaaggtgtgcaatatactgtagcaagggaaaaaaagaaggttgcagatgtctttggttgtaatttatactttaggcttacaataaacaaaatttaattatgacactgaatatctttcatgctgatttctgctatacactttgtcttttgcttacttgttcatgttcttctatggaaaagatcatttcttattgttactctgtataattcatactagtgaataagaaacagcattgttccctgataacctgcacacatttattagtaatatacttacattaattcaaagatatccctgttcttctcttttagccatcttagtattcattaattagtaccattattaatgggtgaatagagaaaaaaataattaaatttaaaattaaacagtatgtgaactctcttcagcaaaagacttgaatagaagggaaactgaaatttattcatgactaaaaattttattcaatagtgggtttcaatattagtgctattcttatacatgtttagacatttaattaatatctgtacttcctgctgttgtgaatctgtttatgtgtttatgttctcagttcattttctttttggttagaaatgagccacgttgtctctggtcattgcagggtttgaaattttctgcagtagtttcctaatacctagaaattcagttgcattgcttatatatattcttgtggctcagtagtatttcttcagtgcttttcttagtgtattcctttttagtcacacaaacaagaaactgctttaagagccaatgtccattctgccaagagacagaaaaaattgagttgtgctatttcacaactgtgttttttcacagggagtgatgttaagaagagtatgcctttcaactgggagcatcccaaatagcaggtagtccaaattcctaagaagagtatgcctttcaactgggagcatcccaaatagcaggtagtccaaattcctaagaagagtatgcctttcaactgggagcatcccaaatagcaggtagtccaaattcctaagaagagtatgcctttcaactgggagcatcccaaatagcaggtagtccaaattcctaagaagagtatgcctttcaactgggagcatcccaaatagcaggtagtccaaattcctaagaagagtatgcctttcaactgggagcatcccaaatagcaggtagtccaaattcctaaaagaagagtatgcctttcaactgggagcatcccaaatagcagatagtccaaattccctctgtgtcctgaacaaaaaaaaaatgcagcagatggttattgattgggtgggtgttttgtttgcttccatagtagcctggacttttccattacaatacttgccctcctttgttgtaacattgtttatatcatcttcctctaccggcacataagctgtaagaggggcttgtctctcttgttgactgctgtttactcagtaccatggtcccttacaaatagctactcaatacatatttattgtgaaataataaatacaggaatcttacctttctgaatgtatttagctgcatcataatcttagttccttcccctggaaaaatttggagatggtgcagggactatttattggtatacagcccatgaatgtccatcaaattctccaattccatcccaatgcctagcttcactcttcattccctctccttcgtgctcccgcagtatcctgcacctattaaaaactgttttaataatcttgggaatagtgagtttattgatgttctggatctgcctctggtgttctggttctgtcatgtccatagccagaacactgctaggtaaacagtctgttggaggatctcatgaccttgcaccagtcgttgttttagctctgccttgtgctgctattggttttggaacagaagagcacacttgggagtacctctgcattttagggccgtctctcatattgcagctggagaaactgggaacaggggaaggaaaatggaaactagtatttgctgaaactctgctacatgccaatcaatctgctggaaacatgacatatttatcttttaaaaaaattaatttaagcaggataaaattaaacctaatttggcataagtatacctcattttacagatgatgaaagaagggctcagaaaagctcatttttcttaagcctgcgtgcacagtaagagatagaattaagattcagctccaggtctttcttagatcaaagtctgtgcatttcctggtaccacactctcctccaataggtagttgttgaggaccttcatgcatagaaccagctcaaaatcacccaactagctgggataaagtttagcctagaactgatatttcctaattcccagtctccttttattaccttctttttattaacatcatttaaatttcttattaaatcatgtaattagataaagtatcagtaaaaagcaagaaaatcatgatttcacaaaataggaaatatgtgtacatgtgaatgatgaaagcaaaatgtttaatgtctgaaaaaggaaggatattgcatccacttttttttgcattgaagaggaagaggttttctggggattttctcataaatgtaaagtattatgaacttgattcaatgaaacaaaaaatatatatcgggggcctaggatgtggtcagggatatacttggtgtcaatgaatgagattttgcaatgttatagcctctataccagtgaaatgttcactgtttctttagagtgaggtaagactagcagtagtgaaagatagaagccaaattgtacctaggatagtatggatcgttgatgttagaggcctcagtggaaaataatggtgagtgttggttggtgtgtttaggaaaagcttcaagtggtatgtggatcctgggctaggtatttccatttgttcagctgaaagtgttcttcagaggggtgatgtgaaggggtaatgaagaaattgctcctgagttgttccaaagatatgaagcatgaaggggagagtgtttggatgtaaaacctataaggcccctcttctgctgagctcaattaatggcaccccaaatcctgagagtcatctgagactcctcagatatacactctggaaaccccacctccttctacctatacccacctccacccctgggtgaccaatcaccaagtcttacaaattttgttccctaaagctgtgttatatttgattctccactcactctgctacctctgtctgatttccgtctttggtcatcttctacctggattcctgagatactttcctaactgatctttctggatcttccagttttgtccttctcaaatacatcctttaaaatcatagctagaataatcccaatcataccttctcacttccagcttaagatctctcagtggcttcctgttgcctgctagagaaccagaaccaaacttctgagcatagcactcagggccctgcgccatccggacaccacctcactctccgccctcttttccacaatgtcaccttgtagagtttctcagtgtctgactggtgatagttccatgtcccagtcatgctgtttctcatgctgaggcctttgctcaagctcttcaccctgcccaggatgtgtctttcgtatgtttcacctgagtgactaacccatttaccaagactcagctcaagtgtctgctccttgccaagaaggacacctttccagaacacccacactggcttagccaccatcctctgtatcttcacatctttgtatttgcacttagccctggtatttttgtattatcttttctatgttttatctcccactgtgtcctaagctcttcaaaaatagtctctgtgtcatatccaccttagtaatcccagcattgagctctggcactctgaatgtgttagttatgctgtgaaagtaagactggatgaatactgggcacatgcagggaaattctgagtttaatgtaacgagagagagagagggcatgcacagtatttcagattaatctaccaagctatgtgaatgtgaattagaagaggatagaggcagagtgatttctgttgcaatgatttaactgaaatcccttttaattccataattcttgattgaaggtggggactgtgtgttaatcatctgtgagctccagtgctgagcccagcttggagtggggtatctgaaatgaagtgaatgtctttaacatacatgcagataaatgatatagataataggtagattggttgattgattgatttcagaaagttatatttttgcatttgaaaacctaacttcctaatagcttaggggatccatttataaggtccttcaggcacttttcactatctattattctcccaaattaagatagcttttgtatgtgggcaggtggaatatttttccccaggatatacaggctgctaatgggcacacaattccagcagggctataggtatgtatgtgacagcccaaccacaagtaattatttctccatgaagaatcccttggagagtcacccactgagaagtacctctctagcctataagacaccaagtattgggtcctacttctagtatatactcctttcaagtagccaagagaagtttgcctctatcttcctaccaatgacttccattcactgcatcgctgtcccatgtcttgctaagttagtaatgctttcttgctccagtacatccttctgatgcattgcacatggggcagcagcaatgtgcaaaggtttgcatcttttttttttttttagataataggctaaaaagcatgttactagctttgcattcatacattctgaccagataccaatatataatagtattagtaatgccattttaaaataaattgtaattcataattgcactctattacttaaccaatccttcatgagcaatgtccttttatggactataatccaagttataatataatttttacagcactcacaggctcctctcattttcttttttccttcaggaaggtgcaccatctcacatgtatgagctttctttaggagttttgcttttgccattctccccgtcttcctctcttcccccattccttttttaaccttcatcatcataacctagaaatgcaatgggaactgtaatcaagtatcacctccctgtgggcctcttcggaggccgtttctttctcttggtgcattattcaccccctcttctttctgtctaattatttcgtttatggcaataccttctcttcagctaaacctagggttaggaaattcttatttaaagtacattttgcaatatcaagatttcaacgactactctcctacctcttcccaaagcccactgcaccccctcctcccctccccctcccccccccccccccggcaatgaaacttaaccagccaggcacggtggctcacacctgtaatcccaacagtttgggaggccgaggtgggcagatcacttgaggtcaggagtttgagacgagtctggctaacatggtgaaaccccgtctctactaaaaaacacaaaaattagccaggcgtggtggtatacgcctgtaatcccagctacttaggaggctgaggcatgagaattgcttgaacccgggaagtggagcttgctgagatcacgccactgtaccccagcctggatgacagagtgagactgtcccaaaacaaaaacaaaaacaaaaacttaaccaatgcagagaatttagaaggaaaatgtccactctgcttcacccaccccaccctagccttaaaactcttgagtctttatacatagggaggaaaaaaactaaatcatacccatttggcttctaaaattggagtacttgaaactcaaatttttagaattaaatggtttttacatttatactgctttaattcatcaaattggtatgagaaacaaggatttggtcccattcctggaaagagtacaacgcaacagagcaaaacatgtgcaaagcaggctaaattagcagattagagaacccgtgcatattgaaaactagaattgagtgtttttagtataagggaaaccactttcatagatcaatggaaaaagttgatagtttaaaaagaaaacatggaatgaaagtgaacatttcttcttttagcaacccaattttattttatatgtctcatttatgtatttattttattaaatatcatgggaattcctaacatttgcatagtactttgtagtttataagtgcttttcactaagttgtttcacttgataatggaccaggcattcaaattaaatagaaatatttctccttttagcactgtggtgaccttcgtagattttttttttatgttgtaccttttcttttttgtttttcaggttcttgagttcatgtaagaggacagtcttaaaacggaagaagaaaaagaagcagttcagtctttgggagagctgcctccttgttgagtgctgcaaaggcctggaattcatttatgacagaatagatctagaaaagtccaagcatgttttctagagtggtgtagccctgtgctgcctccagtgaagagtctcttggtgttggcttcgtgcttccggagggaccatggcaacctccagaggggcctcccggtgtcctcgggatatcgccaatgtgatgcagaggctgcaaggtagggggaagaaatttcaggttttaaaaaaattcaaataccatcttaacccacaatcagttaaatttgtttggggttttactcaatttcatggaattatagcccagaatgggatggatgtctttattccagtgttttcaaacagggccatgctgtcttcagatgctgtcttcattacatagaaggaaaagataaaaatacagcttttttttttttttttttttttgtaattttgtgtctgcattagcatgtcttacatggttattcattgtccagttgggaattaagagttattgccaaatgtactgctgctgttgttcaataataccagtgacaatacatcctcagttgttttgatagattatggacaagttgtggatatatagctatatgctattgtcaaataggtgaaccagtggtatttcccaactagaagacccttagatatttagaatttttttaagaaaaatgaggcaaaagaggcccaaagagatgaaacgatgtgataagatgaattgttcgtggcagggtacagactagtcctgcatccctcagtgatgctcttctccaacaacaaacaacagtggttctcttctctgcttttgattttttttaagatggaatcttgctctgtcttccaggctggagggcagtagcgctatctcggctcactccaacctccatctccctgttcaagcgattctcctccctcagcctcacaagtagctgggattacaggcatgtgccaccatgcccggctaatttttttttttttttttttagtagagatagggtttcaccatgttggccaggctggcctcaaactcctgacctcaggtgatctgcctgccttggcctcccaaagtcctgggattacaggcatgagccaccgtgcccggctgctcttctctgctttctagaagaaaactaacagggaaatgctatagaaactcataggtgaacagattctaattgtcaattttctttacatttatgtttcaatattccttgaaacaaatataattatcacctgtagttatctaaagatattgcttctttgtcataatcccaatgatatattcactgcttcattgttagaatcctaacgatatattcaatgtcataagcccagccttcaaatgcatggtttcaaggtataaaaataccccaatttagaagagttttgtgctagtctttgctaagaaagcttaaacataatgttatagcttgacttttaggttttctagtatctccaacaaatgatcattgtgggtttgcacagtatcaatgatattaatttgtcacagacccactttctttgctcataatgcatttgctgtgcatagcagtaatttccagttaagcattcttgaccttcaaatacataccaagctcttaaatcggggtattcatgacccagaacatgctcacagctatagaaaatcaggatatttgtggaactaggagtttctccacgtctgtccagagatcaccaacttgattgagagcttctgtgttcaagtgaccccccactcgtgtttatctgcctggactggtttgtgatgcttcagtgtgagtggtacatgtttcctatttcttgttgaccaatcccacatgtcatgccagaaagagccttgttagataaaatatccttgctgaatatacagatgggtctagaccttttccatgggctgaaaatttctctgcttgggtctgaccagcaccaaggatctcagatttaagttgtacatcttcacctgggtagatgcaatgctgaatttgagttccattccactgtctatgtttgtctcggctgtttgtctgagggtaaattgttgaaccattttgtgcctcaatgacatcatctatgaaatgatggaaaggaagtcggtgagtcccttacaaaagtgtggggaagataataaggtagtaaagcagattttcctttgaatatattagatgtgaacattctctggatgacatacatcttgaccataagtgaaagttgcaaacagcaaatttgaataaactcaatcagaatcagactgtgttcctacaaacactctactcttcattctgatattagtttgagtggaagtcctttttattaagataattgggttaggggtgagaggaaagtgaagagtatggatgatttaatgttgtgttttattatgttttttagtagatttagttttgcttgagaaatctgtggcatggaggaaagagctggagcctctcaccctatcacacaaataggcctgtgacagtggatgccctatttaacatctacgtgtctaggtgccccatttgcaaaatgtggattgctcccatctgcttagcccctctcagaactgttgtgaagctcaatgagataatttactaaaggagatttaaaaattataaatgctgtgatatggtgagccattcaaatagtcatggaagaaaactggatgagaaggcacagcctgataatttgttcaattttttcctgcaaatttttctaactatccggatttttggaggaatgttaatagttttgtacactctgtgctgtataaaactagtaattttattacacaataaagtaactatacttattgcattaattagcttttatttctataaaagagagagttataaggtggcataagggtacctgacaaagttagaagagtaagcctgaaaattcagaagacaaaactcctgagcactagatacttatcactagcctttggtatcaattacttcatgtctataggttatgttggctacaaaatgtaaagtctgtactgctacaaaatgcaacacatctagcctgcatcaaaggaaactgggtgaaatgacaggaagtgaaagtgatctggcgagtgtgtcttcacaaattgatcaactggattaattctgctgattcagttggtgacgtgcaggtctcttgctctcagttgtcactgtgcatatttactaatgctttaagtccaaagaggggccaatctccacagaaagaggagatctgtcctctgtcaagggtatttagtaaccctgcttacctgctggaacctccaaacaagtgcccaagatcctaataaatggagggctggtattattgcccagataattaagacaaatttgaggaaaagtaaatttccattaacgtaaacagaaccagagttgctaattttcaaagttcaaattcataagaacattctcctagaatcctttttctttgtctagatatgtataatgagtaactaatgtgtttgaggttttttttccccatttttgggtttcattgtcatttcagacctgtgcataactaataaaagcatgcagctttgaataattgcaacttggcactactcccttgcttatttagcttacacccataattgctgactatttttcctgcttttaatttttatttctagggctaggaaattaaagcacacacagagattgctacataatttagctgcaacagtagccattcaatatttcacctttgccaatatttgtgcttgtttgagcataatgttttaggctgggatactgaattatggatgagcagtcagactgcaatgcagagtttcatttgcttttaagaataatgaatgtttctggaactttaatcaatttaaatataaccgtaaaagcaaatacaggacaatagtataataaaggggtattaaaactttaaatgcacataattagtacatacattttctgctattcaagaccaactaaaggggatccatttaacaggtggcttacggagtcacttagtcacaactaagaaaataaatggctgaactctttggattataaacttcttttagatagtgacaacattttaaggcttttttgtaattttttatagttacttaaaaagaacttgttgactgacttttattaactacattttaaatgtgaacatactgtattaaactttatgtttctaaaatgaacatatcagtgttggttattgtaggatggggtgacatcaacgcaatcttacagaaaaagtggtaaatgccagaaaacattaaaatgtgcatgcttaggtgttgtatatacaaaaaaattaataggagagtaggattattcactgcaaggacaaattttgattattaaaccttgtgaatagattgaaagagaaacaaacaaacaaaaaaggataagcatttacccttggagatatagctatgaaatttgctaagtgttcagtataaagtaatcacaatctcctcttgaaaattttttatgagtaataaaaaccttaaaccttttttgttttaagtataatatttcttataagttcattacacaaaacttcagactaacagaagtatactgaaaagtcaaatgaaataataataaataattgatgaaaatgtaactttcttttaatttagcatcattggctatgatcatagcttggaaaagaaaaagcttggcatcctgtgaagattgaaatctttttataatgccttgattaatttttatactaatgattgttggccgcatgtatatcttcttcttttgcaaagtgtctgttcatgttttttgcccactttttaatggcgttgtgatttttcttgtaaatttaagttccttatagatgctggatattagacctttgtcagttgcatagtttgcaaaaattttctcccattctataggttgtctgttcactgtgatgagtttcttttgctgtgtagaagctctttagtttaattatatcccatttgtcaatttttgtttttgttgcagttgcttttggcatcttcatcatgtaatctttgtctgtgcctgtgtcatgaatggtattgcccaggttgtcttctgtggtttttatagttttgtgttttacattttagtctttaatatatcttgagttaatttttgtatatatcttgagttaatttttgtatatgggataaggaagaggtccagtttcagtcttctgcatgtggctagccagttattccagcaccatttattgaatagtaaagcctttccccattgcttgtttttgtcaggtttgtcaaagatcagatgtttgttgctatgtggtcttatttctgggttctctgttctgttccattgatttatgtgtctgtttttgtaccagtactatgctgttttggttactgtagccctgcagtatggtttgaagttgggtagcatgatgcctccagctttgttcttttgcttaggacgccttggctttcatatgaaaaaaagctcagcatcactgatgattagagacatgccaatcaaagccaaaaccatctcacaacagtcagaatggctcttactagaaagtaaaaaaagtaactgatattggcgagcttgtggagaaaaaggaatgcttacatgctgttggtgggagtgtaaattagttcaacctttgtggaagacagtgcggtgattccccaaagacctaaagacaaaaataccattcaacccagcaatcccattactgggtatatacccaaaggaatataaatcattctattataaagaaacatgcactcatatgttcatcgcagcactactcacaatagtaaagacattgcatcaatctaaatgcccattaatggtaaactgcacaaaaaaatgtggtacatatatgccatggaatactatgcagccataaaaagaaaaagatcatgttttttgcagggacatggatggagctagaggtcattatccttagcaaactgatacaggaacagaaaaccaaatactgtatgttctcattataagtgggagctacatgatgagaatacatggacacatagaggggaacaacagacactgtggcccattggagggtggaggctgggaggagggagaggatcagaaaaataactaataagtactatgcttgatatctggatgatgaaataatccgtacaacaagcctccatgacacaaatttacctatgtaacatacctgcacatgtacccctaaacttaaaataaaagtttaaaaaactttatactttattactctaacttaatgactcttcttattaaaacacaaaacagtgtcaaaaactcatttattgtatttaggctgaaatccctttgggtttaatctctcttttcccacataaatattgtgtaaaattatctcaaatttaagtatgatacaaaacagtgatcatttctttatattttggaacattatagttaaatacatttttgataaataaatggataaattattatgcctaacttaatgaattgaagataaaattgatcaaggcaattaaccaattaaatcaattacattgggtcctactttacctgccctctttttgaagaatgtgtatctgaatttttgttttaatcgagtggttttttactataaaatcagtttaaagatacacatcttgcctgaatgagtgatgtgtttgttgtttttgtagacacaatgttttgagcacattttccttttaaatggtatattacttgttcacatcacttttattaataaatttatgaaagtgtttacatttgtgtagtgcttggtcctctaagcctctctttctgccaacctatttcatccattgcgcttcatggagaaagtgcttcaggccttcagggtcttcagtgacctataaaatattcgctctcaaatagaaaaagaaaacagttaaataaaaaaaaaaaagcaaaggtttacaaatactaaattatggcaagcagtcaaatgtaaatcaaatcaattcaaaaattatatatgtgtcagtatattttatatggcatgtaatgtaaattctctttattgcacctttgatatagtgtgtggcaggcctctaaaagtaagagtgtctaaggtctacaaataaaacataaagtatccctctatatcatgttacctccacatgaatttttttaaacatattaccttacttttgttactcttatgatgtaacattaaacacatatagcaaaattacttctttgacctccctgttaaagtcccaacttctttggctgggattccatattctaagtccattttaactgtaacagctttttcctctagctcctctatatatccacctatgtcagccaaatgttactactttccatgctcggaagatgtcctgactctttcatctccttctggggcaccttctggaatgagctcaagtcactgttcctaaaacctgacttatcttcaaggcccaccttcaatgcaacctcctcagcaaaggctttattgccaatacaatcagaaatttcctctccttcctctaaacccctctagctctttatagcacaatatgacaattatcttctgttgctttgtattgggttgcgtgtatgtatctaacctattcacccagaatataaaaactttgaggacaggaattgggtcaaactcacatcagtgccctacatattgtctagcatagtgcatttcataatatggacacttcataagtatttgttaagtgcatataatataaatagttaatattatatttattttcaatgggggaagctgggaggccggaatagaggttatttttgacaagtcaagagacagatgatgggttgaacggtggatggggagagaggtggtaatattctagatatattttgaaggtaagactaaaacaatgtgttgatgaattcggtttggtgtataagagaaaaaaattaaacttggtcctctcacttttagttttgaaataaagaaaaactgttgtgtggaacagcattgaggaggaaaactgagaccttattttggatatgttacattttagatacctggtagatttccaggaaaggagttgagtatatgtatgtaactgtagagatcaatggaggagacacagcaggagaaaacatttggacgttgtcagcacagagatagtgtttaaagctgtgagattggttggcatcacccagggagcccggacagataagaagaaaagaggtttgtgaaatggggcactcaacactgagggaagtggggaatgaggagagtcccacatatgagactaagaagctgcagcctgtgtggtaggaagaaaaaagacaaaaggaaggtctgaaagccaaacaaagaatgagttcaaggagggagtgatcaactgtgttgttgttaattttctttacatgtacatgtttctacatgttcataatatataaaaagagtatgtgcattttatatataaatatcaggtctgagcaggtgcgcgtgtgcctgcctatcatttaaaatcatttctggaaaaataaagaatggctttgtgcattgcccacaaggaggttcaagatgctcagaaattcactggttaggagcaattctttaagaacacattaaatataattctataccttatgtagagcccatttagacataagtcctcagagtaagacatctcttctttcaggccctccctcaatcagcctccctctcttgttgagttggggaccgtgctatgagctgacaatgacccttgtgaaattctcctgtcggtaccatcttggacacttgtgtgtcactgccccgcctctcagtgccttctttccttgggcaaccctccccttagacgtctccactttcaccccttgacattatttctctagatctttgctatgtaactaaactagtattattcctgcttgtgttttggggaagttctttatggagtcagaaatgtctattttccttgctttcatcattgtttaattagctctgccagggctcaaatttatgaaaagaaaagagaaagtatggcactacaggtgactggattgtctggaacattgtaaactctgggatttcctctccatgaaaacctggatggaaccctccccaaaagtaaggcaattgaattggggaaattgcatctgcatctggaaaaactctgttagccactgtgctggtggctgtgtgaccctgtctatgttggatcagagctgaggccttggcgtggtctctgtaagaggagtgaagaccacgccagagcccatgaagtttagagttccatgaatgtataatttaaggtaatatgtacttataaaggggggaaccagactttcagtttcatgtgacaaatccctcatatatcttaagaaacttagaaaaacaattcacatcccaggttattattattctcttttatattctttcagattggggctaatgaggatattacactttgtgtgtgtgtgtgtgtgtgtgtgagattctcacacctaaatacctagtttctgatctttgtatgacagtctgtagtttaattaagcaattgttaatcataagtattcagtgttaatcataagtattcagttaatcataagtagtaatttattttaaatagttgagaatttactgtataagaatatatgcagccttcccataatgctgaggatagacaatgataattttctatttgtttcttctcaaataaatacatggaaacatctcaaagaagttggtgactgccccagacagattcagtttcaaattatccatgtacagttttgaattattttgatatcatgaagtttgttaagtattcaacaaatggtttctgtggtaacttatgttcttttttgttttttattgttcacaatgacctcttggattaaaaacaaacaattccttcctctgctgatattaatctttcatatttagtaaacagtggtctccacccacattaaaaaagttatttacctagaattatgcaattgccttccattcatttgcttcctttctcctcacatgtgtcactggcactttgagttcctttcatctgctcttctttattctactgttgacttgtttactgacttgggaagaattttgagattctcaggacctatcttggtgttctttgttgttgtcgttgttatttgttgatgttgtatttgttatatgttgttgttgttataagttatgagccactgcgttcatcttgccaagaactacactgattccgtattcatggcctgctttttcagctcctttacttttctggggcttctcacagattattttcattttatccaattttggctgatatgagcattccttgctctactattcaacagaaaaaagtggaattcttacaatacatccagaaacgtaggaattcaactagaccacatcccaatattgtaataagatagatctttcaaaacacaacagcagtgacatccattgtcttcttccctgcttagaagcttgcaaggactcactataaccttccagataaactcattatggttggaagggtgtccattgcctgacttcgattaaccttccttttttcatttctactcagcctctataaactatggtgttgcaatcccccgaacaatttctagattccttcaagccaatctcaatctcatttccctgccttacatgttctttttaccttttgcctttctcaagtttcaagactcagctcaaatcctgcctcctctgtgaagcctttcctaataccaccagccagagtgagaggattcctcgtttgtactctactttgaacatgtttctattaaggtgttggttgcattagtctgtaagggtttatgcaagaagctctgtccccattagtgtattagaaccttgaaagtaggcatcttgtcttattcaacttcggatatccagtactaagcacaagtaggtactcatatttttttcagctgacatttagtaggcacttagtttattcaatcatacattcatgcatttaacaaatatttgttgggaatctactgtgctcaagtcttctgaaagcaaatgtaaacgtaacttacagactttgtttcctcatggagctgtggtctatgagagtgacataataattggagaaatttaaaaactgagtggtagatactatgggtaagtatttatttaatgaatagttgaaaaactaaaacttctacaaaaacaaacacatataattaaggaaattaaccagggtagcactctactggatggtctaaattattttcatgtcatcttttactctgcaaaaacaccttccctttaaaaagcacaagtccctataggctggtgtggttgtttagatgggaaggaacttatagttcataatttgctgttcttattttgcagatgaaataacagagttctagagtggttaagtggcaaaccgagttcctaagtagatatttgagggacttcagtctccgagagaattgaggggtaacttagtattcatatattcatgcatattctttcaagattgttcttttgcatagctgttaatgaccacatgatcattatggataggcggcaagcctggctaccttattttcaggatccagcacaaaataaacagttattaggagtaattaatacacaacagggaataaaactgtgtgcagggcccatcagagtgcaggaccctgtgcaaccactcaggtcacacaccatgaagctagtcctgggaggaggtcagaatttggaggacttgggaccctgaagactttagggtcattgcagaagaggaattaagaggtagaaaagtgtaagaagaatggaagtaaaacatcaaagagagccattagctgtttcaaattgtatctggaatcaatcttataaaagggagactctctcatcctcatctcaatgctcccttgaccagaatcaacactagctttgttgttgttgttgttttgttttgagacagagtctcactctgtcatccaggctggagtgcagtggtgcaatcacagctcactgcagcctcaacctcctgggctcaagcaatcctcccacctcagcctcccaagtagctgggatgacaggcatatgccaccatgcctggctaatttttaaaaaaatttttgtagagacgaggtctcactatgctgtgtagggtggtcttgaactcctggaatcaaacgatgctcctgcccaacctcccaaagtgttgggattacaggtgtgagtgaccgtgcccggcccaacactagctcctgagcactgtcaggcaacctgtctacggcttacttatacagaggacctgggagcccacccatcacttacaactttatctttccgggttcaaaataacttattataaagatgatttcatggttatttaatgaagtgaagcttgcctatacatttctttacaaggaaagatcattttgaatattaattatttcaatatcaagtttcccaccaaaaacatttaagtcgtactgaataatcatgatgagaaactagtaattactttgcttatttctggatacattcatgctaattatatgtctttaatttctctgttccaacaattagtaggaaatgtgatacatggcatacaaaaacactggtgaaaatttctgtctctggactttgtcttattcagtgaagatgtaaaaaattcctaaagagtgctttgctcttgtgtctgtaaaagtcaaaaggtgtgaaaacactttgttgagaaagaattgccaaactcttgagtaagagtcagatattctgagatcattttgtgttctaatggtatgacacttctttgactatataattattgtaggtaaacacctatgcataattaataaatttaataacaaattaatgtaaaagatgttttaatcagactggaaatgcatgtgtacaagtaatactctaacaacttttatttgattttatgtttttgtttcttatgaaatatgtctcaactgtgtgataaaatggctccttttcaaaacaataattcttagcaccataacaataatcaaagaaggaatgttatttctgatatatttgaaagttttgtatattttgttctcctgttactttgtgctttaaaaaaaaaaatagtttcaagacaacattgagtcttggagtcatctttatgcatttaatatgatgataacaatagttgtacaaaactccattaaatatttataaatatttggaagacggctaataatattaaacatcctactttgacaagttaacattacctatacaatgatctgcattttttaaaaagcaaacttcactagcaggaatagatatgcattttaaaatagcttcctaggtgacacttaatggttgaaatgttgtgatcctgaaagagttatacaatttcataattttgatggaaaaaaatctttctttttttattatactttaataaagggtacatgtgcaggtttatacgtaggtatacatgtgccatgttagtttgctgcacccatcaacttgtcatttacattaggtatttctcctaatgctatccctcctccagcccccacagacaggccccggtatgtgatgttctcacctgcccccgtctccaagtgttctcattgttcagttcccacctatgagtgagaacattcggtatttggttttctgtctttgtgatagtttgctgagaatgatggtttccagcttcatccatgcccctgcaaaggacatgaactcatcttttttatgactacatagtatttcatggtgtatatgtgccacattttcttaattcggtctatcattgatggacatctgggtttgttccaagtctttgctattgtgaatagtgctgcaataaacatacgtgtgcatgtgtccttatagtagcatgatttataatcctttgggtatatacccagtaatggaattgctgggtcaaatggtatttctagttctagatccttgaggaatcgccacattgtcttccacaatggttgaattaatttacactcccaccaacagtgtaaaagcattcctatttctccatatcctccccagcatctgttgttttctgactttttaataatcgccattcttactggtgtgagattgtatctccttgtggtttttatttgcatttttctgatgacaagtgatgatgagcattttttcatgtgtctgttggctgcataaatgtcttcttttgaaaagtgtctgtttatatcctttgcccactttttgatggggttgtttgtttttttcttgtaaatttgagttctttgtagattctggatattagccctttgtcagatgggtagattgcaaaaattttctcccattctgtaggttgtctgttcactctgatggtagtttcttttgccgtgcagaagctctttagtttaattagatcccatttgtctattttggcttttgttgccattgcttttggtgttttagtcatgaagtccttgcccatgcctatgtcctgaatggtattgcctaggctttcttctagggtttctgtggttttaagtctaacatttaagtctataatccatcttgaattaatttttgtataaggtgtaaggaggggatccagtttcagctttctatctatggctagccagttttcccagcaccatttgttaaataggaaatcctttccccatttcttgtttctgtcaggtttgtcaaagatcagatggttgtagatgtgtggtgttatttctagggctctgttctgttccattgctctatatatctgttttggtaccagtactatgctgctttggttactgtggccttgtagtatagtttgaagtcaggtagcatgatgcctccagctttgttctttttgcttaggattttcttggcaatgtgggctctattttggttccatataaactttaaagtagtttttttcaattctgtggagaaagttattggtagcattgaatctattaattaccttgggcagtatggccattttcacaatattgattctacctatccatgagcatggaatgttcttccatttgtttgtgtcctcttttatattgttgagcagtggtttgtagttctccttgaagacgtccttcacatcccttgtaagttggattcctaggtattttattctctttgtagcaattgggaatgggagttcacttatgatttggctctctgtttgtctgttgttggtttataggaatgcttgtgacttttgcacattgattttgtaatcctgagactctgctgaagttgcttatcagcttaaggagatttggggctgagatgatggggttttctaaatatacaatcatgtcatctgcaaacagggacaatttgacttcctcttttcctaattgaatatcctttgtttctttctcttcaatgagtgccctggccagaacttccaacactatgttgaataggagtggtgagagagggcatccttgtcttgtgccggttttcaaagggaatgcttccagtttttgcccattcagtatgatattggctgtgggcttgtcataaatagctcttattattttgagatatgttccctcaatacctagtttattgagattttttagcatgaagcactgttgaattttgtcaaaggccttttctgcatctattgagataatcatgtggtttttgtcattggttctgtttacataatggattatgtttactgatttgcatatgttcaatcagccttgcatcccaggggtgaagccagcttgatcatggtggataagctttttgatgggatgttggattcggtttgccagtattttactgaggattttcacatcgatgttcatcagggatattggtctaaaattcttttttctgtgtgtctctgccaggctttggtatcaggatgatcccagactcataaaatgagttagggaggattcactctttttctattgactggaatagtttcaaaaggaatggtaccagctcctctttgtacttctggtagaattcagctgcgaatccatttctggtcctggactttttttggttggtaggccattaattattgcctcaatttcagagcctgttattggtctattcagggattcagcttcttcctgatttagtcttgggaggatgtatgtgtccaggaatttatccatttcttctagattttctagtttatttgcatagaggtgtttatagtattctctgattatagtttgtatttctgtgggatctgtggtgatatcccctttatcattttttattgcatctatttgattcttgtctcttttcttatttattagtcttgctagcagtctatcaattttgttgatcctttcaaaaaaccagctgttagattcattgattttttgaagggctttttgtttccctatctcttccagttctgctctgatcttagttatttcttgccttctgcttgcttttgaatttatttgctcttgtttctctagttcttttaattgtgatgttagggtgtccattttagatctttcctgctttctctgtgggcatttagtgctaaaaatttccctctacacactgctttaaatgtgtcccagagattctggtacgctgtgtctttgttctcattgatttcaaagaacatctttatttctgccttcattttgttatttacccagcagtcattcaggagcaggttgttcagtttccacgtagttgtgaggttttgagtgagtttcttaatcctgagttctaatttgattgcactgtggtctgagagacagtttgttgtgatttctgttcttttacatttgctgaggagtgctttacttccaattatgtggtcaattttagaataagtgctatgtagtgctgagaagaatgtatattctgttgatttggggtggagagttctgtagatgtctattaggtctccttggtgcagagctgagttcaattcctggatatccttgttaaccttctgtctcattgatctgtctaatgttgacagtggggtgttaaagtttcccattattattctctgggagtctaagtctctttgtaggtctctaaggacttgctttatgaatctgggtgctcctgtattgggtgcatatatatttaggatagttagctcttcttgttgaattgatccctttaccattatgtaatgaccttctttgtctcctttgatctttgttggtttaaagtctgttttatcaggaactaggattgcaactcctgcttttttttgctttccatttgcttggtagatcttcctccatccctttattttgagcctatgtgtgtctctgcacgtgagatgggtctcctgaatacagcacactgatgggtcttgactctttatccaatttgtgagtctgtatcttttaattgaggcatttagccaatttacatttaaggttaatattgttatgtgtgaatttgatcatgtcattatgatgttagctggttattttgcctgctaactgatgcagtttcttcatagcatcaatggtctttacaatttggcatgtttttacagtggctggtagcgattgtttctttccatgtttagtgcttccttcatgagctcttgtaaggcaggcctgatggtgacaaaaatctctcagcatttgcttgtctgtgaaggattttatttctccttaacttatgaagattagtttggctggatatgaaattctgggttgaaaattcttttctttaagaatgttgaatattggcccccactctcttctggctggtagggtttctgctgagagatccactgttagtctgatgggcttccctttatgggtaacccgacctttctctctggctgcccttaccatttttccttcatttcaaccttgctgaatctgacaattatgtatcttggggttgctcttctcgaggagtatctttgtggtgttctatgaacttcttgtatttgaatgttggcctgccttgctaggttgggtaagttctcctggataatatcctgaagagtgttttccaacttggttccattctccccatcactttcaggtacaccaatcaaacgtagatttggtcttatcacatagtcccctatttttgtaggctttgctcatttctttttacttttttttctctaaccttgtcttctcacttaatttcattaatttgatcttcaattactgatactctttcttccacttgatcgaatcggctattgaaacttgtgtatgcatctcgaagttctcatgccatggttttcagctccttcaggtcatttaaggtcatctctacactgtttattctagttagccattcatctaatcttttttcaaggtttttagcttccttgcgatgggtttgaacatgctcctttagcttggagaagtttgttattaccaaccttctgaagcctactctgttaacttgccaaagtcattctctgtccagctttgttccattgctggcgaggagctgtgatcctttggaagagaagaggcactctggtgtttagaattttcaggttttctgctctggtttctccccatctttgtggttttatctacctttgtctttgatgttggtgacctacagatgggattttgctgtagatgtcctttttgttaatgctggtgctgttcctttctgtttgttagttttccttccaacagtcaggtccctcagctacaggtctgttggagtttgctggaggtccactccagaccctgtttgcttgggttttaccagcggaggctggagaacagcaaatattgcagaagagcaaatattgctgcctgatcgttcccctggaaacttcatccccatatagacctgcctatatgaggtgtctgttggcccctactgggaggtgtatcccagttaggctacatgggggtcagggacccacttgaggagacagtctgtcctttctcagagctcaaacgccgtgctgggagaaccaccgctgtcttcagtgctgttagacagggacatttaagtctgtagaagctgtctgctgccttttattcagctatgccctgcccacagaggtggagtctacagaggcagtaggtcttgctgacctgtgtgggctctacccagtttgaacttcccagtcactttgtttacctagtcaagcctcagcaatggcgaacactcctcctccagccaggctgctgcctcacagttcaatctcagactggtgcactagcagtgagcaaggctctgtgagtgtgggacctgctgagccagcctcaggagagaatctccttgtcttctggttgctaagaccttgagaaaagtgcagtatttgggcgagagtgtcctgtttttccaggtacagtctatcacggcttcccttggctaagaaagggaaatcccccaaccccttgcacttccgaggtgaggcggtgccccaccctgcttcgtcagctcaccctccgtgggctgcacctgctgtccaaccagtcccaatgagatgaaccaggtacctcagttggaaatgcagaaatcacccgtcttctgtgtcgatcactctgggagctgcagactggagctcttcctatttggccatcttggaatgggtctggaaaaatctttcaaaatcagcttgtctaactctgattatttttttatttttttattttttgccacagagtctcgctctgtcaccacgctggagtgcagtggcacgatcttggctcactgcaacctctgccttctgggttcaagtgattctcctgcctcagcttctcagaaactgggactacaggtgtgtgccatcacacccagctaatttttgtatttttagtagagatgaggtttgaccgtggtggccaggatggtctccatctcctgacctcatgatctgcctgccttggcttcccaaagtgctggcattataggcgtgagccactgtgccctgccctaactccaatttttaaagacaagtaactgaggttcctaaagattgacgggtacaaagtcaagcatttagttaaggcaaaataggactggattctagagtgtctgaccctctccagagttatgaaattgtaagcattttcccttgtgataaaaaatatatacttcattaagaaacatggcctttttagctctcttctgagttgaaaagcataactaatattttgtgtgtgcttaatttatataaaattatgaacactacatttacctgtaattagagcacttattataaatagttagagctattgaggccatagccagtatctttttcaactttgcaaaatgaggtgaatagtcactaaatatttactgaatggatattagtgaattcaccttgtccattatgtgcctttgaagagagagagcaagcaagcaagagagcgcacacactttagttcatcactttaatgttttttattatttatttttattttttatttattttaagttccagtatacatgtgccaaatgtgcaggtttttacgtagggatacatgtgccatggtggtcttctgtacctattaacccatcatctaggttccctccccttgcctctcacccctcaacaggccccagtgtgtgttgttcctctccctgtgtccgtgtgttttcattgttcagctcccacttatgagtgacaacaggcagtgtttggttttctgttcctgtgttagtttgctgaggatgatggcttccagcttcattcatatccctgcaaaggacatgatctcatttctttttatggctgtatagcattccatggtgtatatgtaccacattttctttatccagtctatcactgatgggcatctgggttggttctatgtctttgctattgtaaatagtgctgcaataaatatatgtgtgcatgtatcttgataatagaatgatttaggatcctttgggtatatacccagtaatgggattgttgggtcaaatggtatttctgattccttgaggaatcaccacactgtcttccacatggtgaactaatttacactcccaccaacagtgtaaaagcgttcctatttctccacagccttgccagcatctgttgtttcttgactttttaacaatcagcattctgactggcatgagatgatatctcattgtgtttttgatttgcatttctctaatgatccgtgatgttggccaacaaacatgaaaaaaaaaaatcttgacatcagtttttttctgttgcttcagaagggctcttgcaaacacttttctataggacttccttactcactgtagtcacatgaactagtaaattttaactatcaggctattggttaaaaaaataaggacattcggccaggtgtggtggctcacgcctgtaatcccagcactttgggaggctgaggcaggtggatcaaaagctcaggagatggaaaccatcctggctaacatggtgaaaccctgtctctactaaaaatacaaaaaattagccaggcgtggtggctggtgcctgtagtcccacctactgggggggctgaggcaggagaatggcgtgaacccgggaggtggagcttgcagtgagacgagattgcaccactgcactccagcctcggtgacagagcaagacgccgtctcaaaaaaaaaaaaaaaaaaaaaaaagagaaccgaggcatgcctttccttttgccgggcgcggtggctcacgcctgtaatcccagtactttgggaggccaaggcaggtggatcacaaggtcaggagatcaagaccatcctggctaacatggtgaaaccccatctctactaaaaatatataaaaaaaaaatttagccgggcgtggtggcgggcgcctgtagtcccagccacttgggaggctgaggcaggagaatggcgtgaacccgggaggcggagcttgcagtgagccgagatcgtgccactgcattccagcctgggcgacagagccaggctccgtctcaaaaaacaaacaaacaaacaaaaaaactcagaaaaaccaggacactctcttttgaaaactttgccatatgattgattcacttctttgcatttgtgtgctcttctattggtaaaatgcagagtggcaatttagtagacactttattcctatgacacatataaattgagcatctcctgtggtccagatactgttaaaggtaagattctaactctgcaactgacagctatgtcctgggccttcaggaactgtaaagttacgatcaagttgtaaccacaattttgcccttgaagaattttgcagtgagttgctctggacagggggcagtggactctttggaagctggtttaggtccttcctgggctaatgccgggtagcccccagagtctccctgtgtactgctatgcttcatctccggcttggaccctggcccttcatcactttaatcctcatgccaggttttaggaactaggccacattatgacagaaatgccaatgagatccccttcttgccacactacagatggccactgggtcacagacaacaaactgtggctttttctctccaagcactgccaagccacagactgtgaacatggagggtatttaaaccacagatttgtaatgttaacatactctacattatcctaggggaaattggctctggtttcatgtccaagacatttaggaagaatagttgttgattattactttcctgaacttaatattttaactttggctttgggaaggtatgaactacttgaataacatactccgcctattttatttaaaaccaagcaatactctaatgaacacatacacatccaagaaaaagaaaaaaaatacctttttaaattagcaaaaacaccaagccttaatcacagctataaaaatacctttaaagatgtgcatttagaaaagtaaaattgtttctataaaaagagcctttctgcccagaaagctatgtgtagagttttaacctggaattggttttaattggctcagttattgaagcctcaaagatgaagttgtatcatggaagtgttgactcagcctcaagtacaggtcaccagactgaaatgctctaatgcatttcttcttggcagggtcgctttacaatcagccacatattaatgtgaacttttatatgtttgataaagataactatttcctgttatccaaaatagcttctgatgtgggtcagattattgatgtggaacattagacactccctttacatctcaaggacaatcagtactttgaagtaccaagtagcttttgtttctaatttaagaggggaaacatgattccattttttatttcttcattcctagttagctatttaataatttaacgtagaaaatgtgatgcctggaagatacaagatttcatcattgcttctttagatgagaaataagttcaagtggaaaactagtaaggtttctgtattttaagcagagatattctttataaaatatagttgttattttttagaattctattaatggcattaaccattaatagaattttttcctttctccttccttccttccttccttccttccttccttccttccttccttccttccttctttcctccctccctccctccctccctccctccctccctccctctctctctctctctctctctctctctctctctttctttctttctttctttctttctttctttctttctttctttctttctttctttctttgtgagatagggtctcactgtttgagtgcagtggcatgatctctagtcactgcagacttgacctcctgggctcaagttgtcctcctacttcagcctcccgagtagctgggactacaggcacacaccaccacacccagctattttttattttttattttttgtagggacagtgggaagggggcctcactatgtttcccaggctggtctcaaacttctaggctcaagtgatccgcctgccttgacttcccaaagtactaggactataggcatgagccaccgtgccctgcccccaaaaattattagatagatttctataacttttttccaaaattaaaatagctgggatgggcacagtggctcatgcctgtaattctagcacttcgggaggccagagtgggtggattgtttgagtctagaaattcaagaccagcctgggcaacatggcaaaaccttatcgctacaaaaaatagaaaaattagccagatgaggtggtgcacaccctgtaatcccagctacttgggaggctgagatgggaggatcacctgagcccaggaggtcaaggctgcggtgagctgtgatcacactactgcactccagcctgggtgacagagtgagaccctgtctcaaaaagaaataaataaataaagcttaatttcctcagattatatagtaatgcaagttccttaaaattcaaccaacatagaacagtataaagaataaagtgataatcccttcccaataccactacatacacacacacacacatacacacacacacacacacatataaagggttggagactttatctgaaaatattccatagtaatggaaaatttatgcaaactcatcactcttttatatctagaacatatatacatatatgaacatacatatatgaacatacatacatatatatgttctagatatagatatacatatgtatatatacagatatagatacagatatagagatatacatatttatatctatatagaaagtatatctatatacatatacatatatgtatatatagatagtatatctatctatacatgcatgtatagatagatagtatatctatctatctatacatatatgtatatatagatagtatatctatatatatatatactctctatatatgtatataaaataaatagagagatgagtttatataacccttgaattcctgggcttaaataatccacatatatatgtatgtatagatatacatatctatatattctagaacatatatacatatgtattctagatatagaatagggagatgaatttgcataacttttccattactatggaatattttcaaataaagtctccaaccattttcttcaaatgcagccaaactacctaacccagaactacctaacccagaaacagaatacctcctgtcacatccacatcccccaacttgcatgggaagttctgaaaggaaacttatgtcaggagatgtggcttcatttcctttgatcagacttatcatcctggggctaaggacagaacagtccatagcattttcgtttaaaatcgtgtaaactcatttttgcaaaataaccacctgtgatatgttaaagccaaatttagtcattatgttgcagaatatggcgtggaaatcagggagggaggccaaaaaagtctccctcaactctgatgtaatatataggcatactggagttaattttcctgttgcttgaatcacccagcaactgcctcagtgctcagcctcatcaacttgtgctgtgagtgagagtgagaagttgggagaaatcttcaaagaaatgggccccaagaagctaaagtcctgtctcatgttcctggcaatgattatttcacctgcaggctagtgatctgagtctgaaattcacagatcctctgccctggttgacccctggtgctgcttctccaccctggtctggctcatatatgctcctcctgttcttttcttcattttatgggtatggcttgtttgtctttccttgaaatgccacaaaaggggcacctctccatttaagccagctcttacaggagaacttctctttcctgctgcctcagaaaggcacacacacaccttcatcaatttttgttatgtctctccctccttttcctctccctctcccttttttctttcttttttccttctttctatgaatagtagctacttaaaactcaacaggtatgaataaaaagaggaagcaactgtgggtctagtttcagatcacaagaaatctgtatttataccctacttgttccagaaaggattgaaaataacaaaaacacatataatcagaggcattttgtttaaatgaagaattgagtaacatgggcctgtggaaagtactaattaacatcaccttcattcttcactttgtgcagatgtacctgtgttaccttgctaggatggtcatattaaagtaccataactgggtggcttgaacaatggaaatgcattgtctcttggttctagaagctagaagtccaaaatcaagatttcagtagggtgactccttctgagggttgggagggaaggatctgttccaagcctctctccctggtttgtagatggctgtcttcttcctatctcttcttcatattgtcttcctatgggtatttctgtgtccaaatttcccctctttctgaggacactagttatcgtagattagggcccaccctaatgagcttacttgaacttgaaagacttttatctctaaataaggtcacattctgaagtcctggaggttagaacttcaacagatgaatttggtggtggcagtgggtggaggtggcacaacttaacccatatcaatatccaagtctttctcaagctgagggttgaggaaattgggatggaggcagagaggagagtacagaagatgcattaggtaacttatctccaagctcctgactttggcatcaaaggagcacaggcactggatcaaaatgagtggagacccaggggcaagaccatccaggacaagcagcatgtgggtaggcaagatgagaatggccaggtgaaccccggggatgaatttcaaaggcaggtgtcactttttacacacagcctacttctgagtatatggaatcagtaatgagtggacattctcctcactcctgtttagatgttctcatttcatctactgctgggatctcatcttaggaaccagtcctctcaatgacacttaacttccattcaaactgcaactccggttagattcccagaactattgctaagtctagtgattctgcaagcgtttcaatgatggtttgtcgtgttttctgtgggtgtttaagggctcctcctgcctatggcctgaacttcatttttacccatacctgttcagcaggatagcagcctgcctgggttctttgtatattggaaaagttaggcatccacattctaatcctgctgcgaagtttcctcaccttgtgtaggcgacactgggctgtcttgtatttgccttttttgccctaccagatatctcgatggcattgccaattaaatgtcaacctcagcctattgttccttcttctttggtttgcctaaaatatatttattaacccatggattaggtgaacctcaatttcttcaattaaattaaccctatgcctagccaggtctactattgatcatggccttgacaatgatcacatcatatataaatcttgtctcccagtaattatcaaatgctttgcttcctatttttaggcatttgacttgactcactgttgaactctaccaatgtttctgcttttgatttgaatggctgctccctagcttggtgtaaaccatttagcatatatcccatatccatttgaatgagcaaagcttcctcacttctcagagggagaagtttcttttgctgttttgttagatttggaaagtgatcttcccagattgtctgattttaagcttgcaactttaagacattgtaaatacgtgggaagaatcacagcatgtttcccatctagaaaagatgaaactgtttgttcagaccttcactggacatttagttctttactaaaatatcatttttaccgtagtttcatttaagtaagagtttttaatttcacagtgcatacattcatattctgaattactgaaaaattttctgactgtatctcttttattctttataaaataaagagccatctagaggaaaactttcctccagtgaccccaattctttcccatctcttcgtttctctgaacatcaaggaaaatttagacctgaagcaaagccaagaagaaagggaaacatgaacatgaaaattggagctaaatgattgtcattagttaagagagaaatacagaagtagattttcagcagatccatttgtttcttttttgcattatttgccagcaaacagatacttcaaccccaagggaaaaaagttaccatagcttctactcatccgtaatcagccttaaaattctgcacttaagtttctatgtaagacaaaggagaagatgccaaaaagaaaggtttctgtttgctttttaaaaaaataggaacaattttaaaattgtgagctttttaaaaaaaattatcaccctttaccagccatttgagtaaaaagtattgtttggattatacattttataccccagtgtctaaaagaaagccatgcataggtgagatctgtttggactctcagttccttctcacctgggtcatggcaactgttccttagcctctcgccatctgttgttttgtttcgtcacctcttctgaggtttgtgccgtatcagagctatcctcctgttaaactgttcgcctttgttacatactatatgtgaagtcatagggcttgtcaactgctactgcatttaatggagtcgtcagtcctgatgagtattactggactttgctggctcttgttggcactaaaggggagacattttatagaatttactgaatctcttcaggtctcacattattttttggttcaacccaagtcgtaccttttaccttccaggtagttcttgtgtctccagttacctcatcttctacatttcacctaccagatatcatttcatgtagttcatcttcatctattgacttgtagcaccttgttagagtgtttgtgtctgactttctatgctataggatacgtatatgatttcataatgccattgcttttgtaggataagtaaacaatagaagacatagcaatgtaaagaaaataatacccttgaatacacttgactcaaatgaatctggccaatggattttaattcttactatagaaaggcagcagaattttagttacataatgagcagttttatagtcagtagtttgggattcttaccaaaggaattgaccaagcctctttcaacttttcacaatttatccatgtttatctaaaaattaggcaaaaaaccctgatgtatctggctctcgtagacagagtgtccacagcactaattccaagcatttattgttcttttgtcgttattcctttgggaaccaaagacatttttagttctttgatctgatagtgtcaccaatgtaggactgctcagcatgtcaagggcgggaagtgggaggaattctggaaagccctgtgggtgtgtgataacctaatgccatcagataagtagatccaaatagtactgcacaaagagcattcttcctctgtattccaagcacttactagagcagcctgcagtgatgttttccttggcaggcttgtgtagtcattattagccagtggcttgtccattttaaaattggtgatcatttgaggactcaaggggctggatttagtgtttttaatacattcagaacgataatttttctctcctgtgaatttgtagtattgaaattattaaagaaacagtaaatttccttggactgtgctgtttattatctcacgagaagggtgaaaattaaatccagatgtttgttctctgtttgattacagtataagactcagaagaggcctctgatctattaagaaagataataacatcacttgaatttgttattattgggcttctctctgtgacaaagatgaacagcagcaaaacatctggattaacatggaagcacagctagatgaaaaataacactgttaattatatcataaaatactcttcttggctattgtattatctgtcagatagatcacatattgaatgtatatttatatgttacctgcttctgtttctgcatacaaagaccagacttacccagattcaagaattttgaattcttcagattcatcaactgtgatgactaattgccacattgtcccttcttgcactctacaaatggcagactttcttttaactttgcaaatgaagaggacaccacattcccatgatgctattttgaaactcttgaagctgattcattatgggaagtattgctaagagaccattgagtttatgaaaaactggcaaatgtgacttaattaaattacttaaagaagaattgttttaatattttaatgtgtatattcagtttctgtattagtcagttttcacactgctgataaagacataccctagacagggcaatttacaaaagaaagaggtttaacgggctcacagttccacgtggctggggaggcctcacaataatggtggaaggtggaagacacgtctcacatggcagcaggcaagataagagagcttgtgcagggaaactcccctttataaaaccatcagatctcgtgagacttgttcactatcatgagaatagcgcaggaaaggcccgaccccatgattcaattacctcccaccgggtccctcctacaacacatgggaatcacgggagctataattcaagattagatttgggtggggacacagccaaaccatatcagtttctgaatctgtatatctgagcctgagcttttttctccctaaggcccaggaaatatttcctttttcttacctcgtttaaatgtaataagggatggtgccttcgttaccacttcatcaatgcagtgatactgatactaaattagatggagctcgtggatcaattcctagtcttagaaaaatgaaaatatgtatgtatttataaaaatcatcatgatataaaaagtaaataatactcactaccatagttgctatagcgaaagaaaaagggagattttctagagaagaaaaacatcgcttgactataatatatactacatatttaagcatgtattttagggatttttccttataaatatattcataatagctacaacaaaagaaagaattcattacaagtagctgtttcttcagtggacatgcagtctataattgtataatagtcacatggtctctggagtttgtgctcactcattctgaacacagcagatatctggctgctgaattaaatccaattcaacagccgtttatcttgtacttgccaaactataggaggccaaggcatgaggatcacttgaggccaagagttcaagaccagcctggggaacatagtgagatgccatttccacaaaaaataaaaataaaaaaattaatcagacatggtggtgcacatctgtagtcccagctactcaggaggctgaggtggtagaaggatcacttgaacccacaaggtcgaggctgcagtgagccctgatcatgtcactgccctccagcctcggaaactagagtgagacactgtatctaagaaaaaagaaagtttgaggcaaacaggaaagtgctttaggtagttttagttactgtaagatgcacgtctatttaatgtttaaaaataaatttctctccatatgctcaatgggaaaacatgttgctcaaaaatcaaatgtctgttggtttactaaaatatctagagcctcccagagcaagtgtgtgtaaatgaaatctaccacttcatatcaatttaacaaaaattttttatgctattagagaaatacctatgattggagaagagggtaagagtgatcttattgaattttattttgtctaccaatttagtgcccacattttccccagacatatggaggccctcatgttcctggcacagaggatgagcagtttttgcttgtgcctttgtctgtgcctttagagaggaccagtcctttgtgaaataaaccaactgctctggtaagttcgaaagtctgtaatgccaaatgtatttgactgtcaaattcaacaggaagggaagatgataagaagaaagatctcttttcaattaatttttaaacatgttgttttgtgaataccatcgttaacaagatataaatcctttacatatcatgcttcccataccttttcctttcattctgcttacgtacaatacttaccttgaaagttagcagtgaacactcccagtcaccatgcatagtggaaagcttcaagaaataagaataataataaaaaagttaaaactataatgataacttggccgggcacactggctcactcctgtaatcccagcactttgggaggccaaggcgggcggatcactcgaggtcaagagttcaagaccagcatggccaacatggtgaaaccctgtctctactaaaactacaaaaattagctgggcatggtggcacacccctgtaatcccagctactcaggatgctcaggcatgagcatctcttgaactcctctgggaggtgaaggtttcagtgagctgagatcgcctgggcaacacagtgagacgtcatctcaaaaaaaaaaaaaaacaaacaaacaaaaaactgtaatcataactttttaaaacaagaaaatggtcaaaaaatacctcataatgtaaaattggccttaaagtaaatactgacaattgttcttctctaagttccacccagggacacagatcacaagaggctttttttttttttttttttttttttttttagattgccctttttgccaggcacactcttttgggatagaagtgcaaggaatcagaaagaaatatgtagaatcaaccccttggttcgagccctcagttctccactgtgatggcctgatcagggcagctagctccatctctcttctcattctatgtacaagcagatgtaaggacaaggtccccatttagctattcaggatatagaatatttgaaacataatagcatagaatttcagagtgggactagaccttagagaacatagacccaacagccgcatcgtacaggtgaggcagctgtgtgaccttgaagtttactgctttgtcagagcctaaactctagattggctgctgctgtaaagtttccagagttcccactaggggcagatgtagagccaattgcattttcccacaacagctctgttaacagatttctgtttcagtgtttccaaattcgggaaagaatatatagtttctggcaaggcagtttggaatagctagtggcaacatttttaagtattacgattaaaaaaaccagattgctcatttattcattcacctactatttaataaacttctacaatcctacttgagataggggtgtcagcaaaagcatgctaacgagttgatgttgcatctgagacctgcatgagaaggacagagccttgaaagcggggaaggcattccaggctgagtaaataacaaacataaaggttcttgcaataaattgaaccagtgtatctggagcttggatgatgatgtgtgaaatcaagcagttgtgccttgaaaagttcacatccagtggagatgttgagaaatcagttttattgaacaggctggggctcagaagagagttcaagggtgaggatatgtgtttatgatttgggagcataaagatgacatttatccagatgagatttactgaaggaagaatgtagaagtgatcattgttcacttggtcctccccagtatttttagttcagaacaaaagacaggagaccgcaaaggaacctgaaaaggagcagcagtatggtaaataacaagccaaaaacaggagaagaggatggctgggcatccaggctattggagttttaagaatgagggtgtaaactagcaatggtaatgtgctgaaaggtcatgtcatatgagaactgaaaatgaagcttggaatgtggtacggtgaaggtgtggcattgataagaatgttttcattaaaatagtggagatgaaagtctgattggcctaggctcaggagagactgggaattgataagaatgttttcattaaaatcatgaggatgaaagtctgattggcttaggctcaggagagactgagagttgaggaggtggagactgactcagtagaaattccttggaagagttttttgtacaagagagttgggaaactgatggtagctggagggagatgtgacatcaagggacgtatttattttaatgaattgtttttagatagtttacgataaatatgggacacaattctgtaatttaaaataattcaccctgtttcctataagctgggtcttgtgtagcatcaaaataaaatttcttgaagatttcatagattcattggatattaagtttagaatacctcctaaaggtaatataatctgaccttttagaaccacttccctgtccatctttggatagagcaaacatccaaaacccagttctttatgtatactgaacagaaatatgtctctttgtaacttcattcatgtgtcctagttttatcccattgggcctcaggggaccttgtctggctgttcctgcacatgaggtgatgctggtctcctcagcgttcctctcttacaggtcaacactcttatgtcccctgtccattctttgtatgatttggtttcaaactaaaaaatcagtcttatgactattccttacagtgatccctgtcccacacagaatggcaagaccagtagactttatgggacttcacctcttcccttgactttgtgcacctgacaatgactcctccctccagctactgaagcctttccagaaacaaagaaaatgaaaattgagcagaatgggatggggcggaggcagggggtgggggaagaatcttgtcctcatctaaaacattggtaaaaagaagttaatgagaaggtgggtgggttctgctcactatggttttttccagaccttagtgattaaagagctcttgtttgtggaggcccatgttactaacatgctgcgaacatatctaggtgctctacttaatgatctcatacgattttcacaaccctgtaagtaggcatttctatctctgtttaataaatgagaaaataaaggccccaaactctaaatatagtaaattggtcaaggccacatggtttacaaatggcaccatcaacattaaaaatcacagtctgtctgacctcaagtctctcttagactcaacctggcatttctcaatgcactgagatcacaactatagagtccttgaatgttttccgtcctctatgtcttcaagctatgtcatttttttttttaaaggagtctcactctgtcacccaggctggagtgcagtggcacaatctcagctcactataagctctgcctcccggattcacgccattctcctgcctcagccttccgaatagctgggactacaggcacccgtcaccacaccctaatttttttgtagttttagttgagatggggtttcaccatgttagccaggatggtctcaatctactgacctcgtgatccgcccacctcagcctcccaaagtgctgggattacaggcataagccaccgtgcccagcccaagctatgtcatttcataacacatttcattgtagtataattttctttatggtacaagtcctcattgaatgctatcaatagattcttggaaactgcaaactgtaacttcaagtgagatgacttataaggaaacccatttgaccacaagttaattgatataaacaggagtcaagctcctgtggcatatttctggttgcaaaagtttcaccaaacttctaaataaagaccaaaatacttctcatattaaacattgaaataaatgagttgtacatacatttaagaaagataaatacctacatattctagttcagggttgcgggtggtcagagcccaccccaggagctcaggtgggaactgccccagccaggctgctgttgcattgcagggcacactcacacccacacccacactcactcacactgggcccatgaagacatgccagttcacttaataaatacacagatgattatataaggtgtgatatgatggataatccggaagagaggcactaataaattctctgccctctcatctgtgagtgaaggtggagaggatattatcaagtgaaggactttgattttcttttatacttttattttagatacagagggtacctgtgcagatttgttacatggcaatattgtgtgatgctgaggtttggagtacagatcccatcaccctggcagtgaacatagtaccccatggacagttttttaactcacttcctccctccaccttctagtagtctatagtgtctattgttcccaaatttatgtccatgtgttttcaatgcttagttcccacttataagtgaaaacatgcagtatttggttttctattcctgtgttaatttgcttagggattatggcctccagctccatccatgttgctgcaaaggacatgatttcattgtttttatggctgcatagaattccatggtgtatatgtactacattttctccatccagtctaccactgatggacaccagaattgattccatgtctctgttattgtgaatggtacagcaaggaacctatgagtgcatgtgtctttttggtagagtgatatatttatttattttttgcatatacccagtatatgcaaaaaatacccagtatatacccagcatacacccagtaataagatttctgggtcgaatggtagatttgttttaagttctttgagaaatctccaaactgctttccaaagtggctggactaatttacattcctaccagcagtgtataagcattcccttttctctggagcctggcaagcatctgttgtttttgagtttttaataagatccattctgactagtgtgagatggtatctcattatgcttttgatttgcatttttctgatgattaatgatgttgagcatttcttatatacttgttggctacatgtgcatcttctttagagaagtgtctgttcatgatttttgcccattttttaatggggttttttgtttattttattttatttttttgctgttgatttaagttccctatagattctggatattaggcatttctcagatgcacagtttgtgaatgtctgctcttattctgtaggatgcctgtttgctctgttgatagattcttttgctgtgcagaaactctttagtttgattagttcccacctgtcaatttttggttttgttgcaattgcttttgggaactgagccaaaaattcttttccagcaccaatgttgagaagaatatttcctaggttgtcttccaggatttttacattttgaggtcttacatttaaatctttaatatattttgagttaatttttgtatatggtgaaaggtaggggtcctgtttcaatcttcagcctagggctagccagttatcccagcaccatttattgaataggaagtccttttcccattgcttgtttttgttagccttgttgaagatcagatggttgtaggtgtgtggctttatttctaaattttctattctgttccatcagtctatgtgtctgtttttgtaccaataacatgctgttttggttactgtggctgtatagtatagtttaaagatgggtagtgtgataactccggctttgttcttcagtagcatttctgtacaccaacaacatctgggctgagagtgaaataaacaacacaatcccactcacaatagccacaaagaaaatgaaatacccaggaatgcacctacccaaagaggttaaagatctctaaaaggagaattacaagacactgctgaaagaaatcagagacaacataaataaatggaaaaacatttcatactcatagattgaaagaatcaacatcgtaaaaatggccatactgcccaaagcaattgagagattcaatgctattcttgtcagactaccaatgacatttttcacagaattagaaaaaaactattctaaaatttctgtggaaccaaaaaagagcccaaatagtcaaagcaatcttaagcaaaaagaacaaagccagaacttgatatttttaatgaattagtatgtgagacgagtttcaaaggaaaagtgaattagattgtccattggcaggcagagaactagcataagcaatggagtggaggtgggaaaccttaaggtaaattgggacacatcctataactcagtttagatgggacaaaggatgtttattagtgatcagtgacagacaagttaggaaagccagaaccacacccacaaagataagactattattttgcacttggcaacaagaaaccatacaggacttttttttaaagtaataattgtagaaactatgggaagcttgtagttttttggtaaatataaattacatttgtaattataagaataatataataataatagtttttgtctttttgacatggtaaaataaaacatttaacataaaaaattaggtagtatgctatgacctatgtggaatattccagaaaaaaaaatggattttctctcatacatgtcttaatttaaatgtgttgttataatctaagattatattttgttatgcctcaggtgactatttcattcagatgaacacagtttacaaagttatagtaataagacataattttttttagctgggcacagtagctcacacctgtaatcccagcacttttggaaggccaaggtgggaggatgtcttgaggcctggtaacagagtgagatcccatctctacaaaataataataataataataataataattagtcaggtgtggtggcatgcacctgtagtcccagctactcctgagactgaggcaagagggttgcttgagcctagggttcgaggttacagtgagctatggtggcaccactaggtgccctagcctgggtgatagaatgagaccctgtctttaaaaaaaaaaaaaaaaaaagaaatgtttagggacaaattggttctggttcctctgctgagtgaagtatgcttttatatattgagacagtaggttcaaacagcaaactggtggaatatgaaagaatgtgtattgaaaaaatggatccagctaaggtttgctaaagtagtagtttcattttgcattaatgtttcaagtgggtaactgcaattcatattaattaagagagccatgctagatggttatgccgggcctttgctgcctctctaaaggggagtcccttagggctggtcacatgcacatgtgattcttgcttgactcaaagcttccaaatattaatggtgatatgaattgatggatgaaatgttgactgcagactttttagaaaaaagttcccatatggttctatttttgtacctttaacattgtaacttctgacctgcacttctaccggtttagatccatttattaccaaaactcatttttatgattgattttctgatgagaagatgaagagttttcacactaacaggtttttacttaaagccaccataaaaaataagactttaaaataaagaatatttatattaaatttcatggtagaaaatggttttctgagattactagtagcctttctcagataatcaaaactaataatagtatatttcatgattacataatcccatgaaatggctaacaaatacccattatcgccactaaaaggaaggattagaatacagcatttggccaggcatggtggctcactcctgtaatcccagcactttgggagcccaaaatgagtggattacctgaggtcaggagtttgagaccagcctggccaatgtggtaaaatcccgtctctactaaaaacacaaaaatgatccgggcgtggtggggttgcttgaaccagggaggtagaggttgcagtgagccaagatcatgcctctgaactccagcctagacaacagaacaagtctctgttgaaaaaaaaaagagaaaaagaatacaagcatttaaaactcttggctttcctgatttcttgcttgttatgtggctgtagagggttaagcctggcttatttttcaaaaggtgcccttagtgctgggtgccctcccagggacccacctggatgggcctttgcagggtgtccctaccagcctcttttggatgcagggtgaagaggaaagaaagttaattacctagaagacttcaaaatgtgcctgcctttccttctcccttctaatgttcaccagaactgcaaagcgaggaagcctggacagtgagtttcaaaagagctcctctggcaagtctgacatcccacacatccctcctccccaacccttcctatccataatgtaggggcagcttgacctgctgagaggattcttttttcttctgcaagtctattcttgacattgcttgtcctagaacctagttagctactgatcaggactctcattggctgtccatctactcagggagtaaaagcacacacagaaaaaatccagaccaaagaacttttaatagaatagttcttgcctttctgtgtgacattgtatcactgatcatttcaatcttgaaaattgtcatctctatttagcccagcacggtgtaagcttcttcaaggcacagattatataagatacttctttatccttaatgcccagtacagaccctcaacaagaaagttattttaaattttcttgtgggttttgttgttgacatttatgttttattcactgctgcccaccttagtcctaagtctgatttgagacatctgtatctgatgaagcagctgggggtgagaagttaaagaacttgaatgtcagctagactgtgtaaatctctaggttcttcagacagacaagtgataaaggtgaagcagtcttgaaattttacggcatctatgtctaagataagtgtccagttaaatcctgctattattattcttaaacagaaaaacatttacaagcccaatgtaagagttggttctttgattcaaggtgactgtccctcttacttaaatcaatgtagtattcccaaaatcataatttatagtagttgagttccatgtggcagaaaaggaatttcttccggacaatggttttaaaaccatttctgtgattactaatggctatcctggattttccaataagtgagaactcaagagaatggaaacacataatgctgcctgccaccacaatctagcttgcaccttacacatcagagagaggtgtcctaatctcacacagcaatattgccacagcagaccctctacaagagaggatgtgggaaggggaaagagaagagattaaataagaggaagttgctaaagagatttagttccctttctgttcctttctgcctgagcaactcaccccacaaaagcagctctttttcattagttttttcattattctacaggcatcctttgcttttctactagtcactattttgtgtgaatttgattttctccaatattggtcttttaaaatgttctttcttttcagtgatatgtatcacagtgaaaatttggcataacctaaatatctaaaaatgggatattggttagataatttaagtacagccattcaaaggagcagcagctagcccttggaataatggtgtaggagttctggtaaaagatgataaggaaggatgtttttatttttccctgagacttatcaaaagcaacaaaaaggaatgcaaaaattgtggaaaaaattcaacattggtaaacttgaaaataatcatactcctacccaaatctttaggataggagtatctctatctgtcaaataatagtgataattggatcagatcaagtgaaagacatcaaagactgatacataccactctgaagctcagttaggatatggacttctctaaagataagcgaaatggtcccaaaataaccctttacaaagatatgacttggcccatgggaagccattgtagatgtggagaatgttctaatacagaccgattttctttctgaagaacatcagagaatcagggctgaagaagacaacatagagctgcaattattttctgtgacctagaatagacttagcagtttgttaatacagtaatgtgttaccaaatgggggagtcttctaggaatgtagggataattcaatattatgaattatattaatataatttatcttagtaataacccaaagaagaaactctgtacccatccaaatgcaaaataagttctatgaaatttgcacttaattctgatttgtataaaatcttcatagtggtgtgtgtgtgtgtgtgtgtgtgtgtgtatgagagtatgtttgtatatagccagcatcagtgctaagttttaagaacattcccaccaaagtcagtagtcacataccagccaatataattgggtacaaataaataacaaaaataattagaagtggtatggcaaacctatcattagttacatatattatcaatgtatgactggaagacataaaggaattaactgaaaagctgttaaaaaacagcaagagaatttaagaaggtggaagatatcaaatgcggagaaattatatgaggaaaaatctgacacagtcttttgaggaatatatagaagaggacttggactaaattgaaagacataacttgttcctggacaagaaaactcacaataaagatgtcagataacaaattaagctaaaattgcactcttgagcaagacttttaaaaaatttgaattgttagaaataattatattaattcagaaaaataaacattatatggtatatagaaaaaagtctacaaaagaagagttatgagggaaacctaattctattagatattggaatatacttgccaaccatagtaatttagacatatatatactcagggtggaatatgtagttcaaaataggcccacatatgtaagagatgagaatattcatgtcatcatttggagactcttggatagggaagcagaggaaaggagctgacttattacctcatgtctttgtatttcacacagcacacacagacaccccaaacacatgcacacatacacacaaacacaaacacatgcgatttcaagcagaccaaaggtttaaatacatttgtctgcaactgacattttgtaggctaaaatcacttatttttacgattccatatggcttaacctaaattttaaaagatgaaaccatagaactattttaaaaatcatggcggtgtttttctttttcttttataatctagtaatggggaaatcctttcttagcttgtcagaaacccagaaccaaaaagaaactgatttgtacatttcagtgcctaaaaatatctgcacaacaaaatgtataaataaaaagcaaatgagaaagttggagaaaaatgtgtcacaaatatgacagaagttatataattttgtaatagacaaaggtctttataaatcattacaaaaaggaaaaccagtcagtagaaaataggcaaaagacgaaaacatctgcacttaggcaatattcctccaattagagacgtgcataaacattgagtcagtaattttgtttctatgattttatcccacggatctatttgcatttgcatgcaaaactagaccacaaagttgttaattgcaacatttttgataatgctagtatattagtctgttctcatgctgctaataaagacatacctgagactgggtaatttataaaggaaagaagtttaattgactcacagttcagcatggttggggaggcctcaggaaacttaacagtcatggcagaaagagaagcaaacacgttcttcttcacatggcggcagcaaggaaagaactgccgagcaataggggaaaagcccctcataaaaccctcaactctcatgagaactcactcactattagcagaatagcatgaggataaccacccctatgattaaattacctcccaccgggtccctctcatgacacgtagggattacgggaactacaattcaagataagatttggatggagacatagccaagccatatcagctaaaaacatcttatgtttccctataaggaactctttatgaatagaaaaatgcattcataccatgcaacattatgcagctattaaaatatgatgaagatttaaatgtaatgtaacgtgaagatgcagaagcatgtatacatttttattccagaaatattttctgcatattttcttcacaagagtgtagggttacatataaatattacgttaacttgctatattaaataagatatgaaaagtataaggccgggtgcagtggctcatgcctgtaaccccagcattttgagagggtgaggagggaggatcacttgagcccagaagtgtagagcagcctgggcaatgtagcgagacctcgtctctactaaaaatcaaaaaaattagttgggcatggtggtacacacctgtggtcccagctactgtggtcccagtgaggtctgacagcgccattgcagtccagcctgggtgacagagcaaggccctgtctcaaaaaacaaaataaataaataaaataagtagggatacagagaagcagatgttattttgcaccaaggggaatacattaaatatgtattttgggttatctctacttagattataaattataaatcacactaaattaagtataaaaagttaaagtatagtatgatccgattttgtgatctctttctttctctctgtctctctctctctctctccatatttattgaaactttgtggccaggcactactgcaagtgtatatgacatgtgtcatcttatttaaatctcaccagaaccctaaggaaaactttaattattgtgctccccgatttagcagataagggtatcgaggcacaagtgtcataatctgccaaagatcacagagctagggagtgccagtgccaggatttgaaagcaggcagtctggtaccagagcttctgttcataacccccaggcaataatgccttcctatacattgcctctaaatccatcgcaaagatgcacacagaagagatgtttttctccttccttgtgtggctatatctagtttttaggtaatgttgagtaggataaacatatttgttaggactcctcacctccagtccatccctgcttttttactctctgccgcaggcccacccgagtctaattctcccacttttgctctcaggaaaagagctgataaattcagtcaaatgaccagtgaggcatagtgctctcttccaatgtcccttttacagcagaaatgaaccattgattccagactgacaggctcatctgagtcactgccagctttcaggggattggaggctgatagggggatttgaggtaggagaaattctggaacctgtaaaaacagacacagcctattttaccagtctctggaagtaaggcgtcttctgtttctctaagttttctgataaaggtcccacacattggaattgttgtaataaaacaggcaacatttatagatttcctatttttctgcacaatcctcacagtaaccttagaaagctggtgacactatttttatcctcataataagggaatggggctcagtacagtgaggtaatgatgcccaactagtaatgatagagatgtcactgcaaagcctgtcctcccagggaggcagatatgggttgagggtgtgagaaagggaaagttgtgatgatcctaaaggcccctccaccctgagtgaccttcattttaggatgtgacgcatgaagccggggcacactagaagtcccaacacacagtggttccttaatgagggtcactgatttaggatctgagcaaaggtaactcaaaatatatatttaatgtattccctttggtgcaaagtaacttttatattactcagtagcagcttatttattggtctttgtcaataaaataattataaaatgtataagatttataacacttcagaatctctccactccaacaaagtgaccacttgattttaatagcacttcatgattttgtctgtattcatagcaaaacaattactaaatagaatactctgatgaaaaattttaaatatgattgcaaccttctacaaagtatttagaaattatgaaataaatttatattgtagaattacagatttcagcaaattttgaaaaggccacaatatatgtaagtggccagtatactctttaacaaagatgaagtaattttaaaaaaagatggaagtaatagacactgaaaactccaaaaaagggaaggatggaaggaggctgatgattgaaaaataacttatcagatagttttcactgtttgggtaatgggtacactagaagcccagtctccaccagtaccttatattctcttgtgacaaacatgcacatgtaccccatggatctaaaataaaataaagttatatatatatttatttatatatatgtaaaaagttttgagcactggtaacccattttaagctggcaacatgtatatgtaatatgtaatatatgtgtgtgtgtatatatataaatttgacttaaaatttaactcagtgtgtgtacacactcatgcacacacatgtatatatacacatatttgaatacttttagggggtgagtgggactaggtaagtaatgatattgttattacaaggagagatgtgagagatactatgagaatgtttaagacaaggtgctacagagaagggaaagagaacttccagatatgatgatattatgggagatcttacctttgaactaggtactaaggagaatttttaccagctgccacagaagagctgaaggtattcagagtgtcaggctaacttgaaaaacttcccttcaggcaggcagctggtgggaagtcctggctatgtttgggaagtagggggtggagggggatacgatttggcagaagcaagctgtatgtcatacaactagctctatgtgggttattggtgacatgactaggaagtaggttgaggccagattggaaaaagttttgagtactgggatatagagcaaaaagcctgctaggcactggtaacccattttaaggtggcaagggagtgatattatcagagtcaagctctgaaaaattaatctagtgttcacaagaagagtgaatcggatagcagagactagagtggggaagacaagaatagatgcataagaatcagcaggggacatttacaaaaattcaaaccctggatcccaccactggtgattttgactcagtgagtctggagcgagccaggggtctgcaatattaacaaaacccccaaggcattcttgggctggtggacaactaggttccctttaagaaacatcaagggaaagtgatgaggtgtttgcactaaaactggaaagggaggtctgaggacaggacaaggaatgaaagcaaaggtgacggatgagacgttggtgtagcgagaggggccatgagcagtgggaagttggtgtgcttatgtctgctatagtactcaccacatggtaactgcatgtttacatggttattttcctactctgaagtccctacatcatccttttaggatgcagtggctacttagtaaatatttctggaatgacattattctttgcaccctcagagactcctgtgtacttactggtgagacttctggtctctctctgggtaactgggaggtcatttgatttgaggtacaggctgaaggttgtggctgatggagaagccctctcacaacattccagtccctggcccactagggcatcccctcttacctgtgcaaataaaagtcctagttgattcaggcccatacatggtttagcctgctgcacttcaccgggaattcagagagctgtcagtgctatgttgagggcattctcagggaagcaggtctttgcacacatcagtagttcctgaggcctctctggaagatgtattgttcattttaactaggtaggttttgctgaagtttacaaagtagagactaactgatcaatgaagaatggaacacattgtataagaagccaagagaagagcaacattacaggtattaacagatgtagcccaatgaatgccaaatactcttcctgcaaatgtttacatctaagtgtacatgtgttctggtcatttgtggctctgtaacaaattagaaaactcagtagcaaaaaacaatcacttttattctcacacattttgaggatcgggaattttggatagggctcagtaggaatggcttatctctgctccacaatgcctgggtcctcagctagaagacttaaatactgatggctaatatgcagaagagtgacactagaccccttcctttcaccatatacaaaaatcaactcaaggtggaccaaagatgtaaaggtaaaatctaaaactataaaactgtagaagaaaacctaagaaatactattctagacataggccctggcaaaatttcatgatgaagactccaaacgcaattgcaacaaaaacaaacattgacaagcagggcctaattaaactaaaaagcttctgcatagcaaaagacactgtcaactgagtaaacagacaacctacagaatgggagaaaatatttgcaaaccatgcatctgacaaagatctaatatccagaattcataaggaacttaaacaaatcaacaagcaaaaactaaacaaccccattgaaaaatgggcaaaggacatgaacagacgtttctataagaagacacgcatgtggacaagtatatgaaaaaatgttcgacatcactcatcatcagaaaaatgcaaatcaaaaccatgatgagatgccatctcacaccagttataatagctattactaaaaagtcaagaaatgacagatgctggtaaggttgtggagaaaaagggaacacctatacattgctggtgggaatgtaaatcagttcagccactgtggaaagcagtttggagatttctccaacaacttaaagcagaattaccatttgacacagcaatcccattactgggtatatacccaaatgaatataaattgttctaccataaagacacattcatgcagatgttcattgcagcactcttcacaatcgcaaagacatggaatcggcccatcgatgatggactgggcaaagaaaatgtggtacatacacaccatggaataatacacagccataacaagaatgaaatcatgttatttacagcaacatggatggagctggaggccattaccctaagcgaattaacacaggaaaagaaaaccaagtaccacatgttgttacctgtaagtgggagctaaacatcgagtgcatatggacacaaagaagagaataacatagataccagggtctacttgagggtagaggataggaagagggtgaggattgaaaaactacctattgagtactacgctcattacctgggtgacaaaataatctgtatagtaaacccccaacacatgcaatttacccatgtaacaaacctgtacatgcaccccctgaacctaaaataaaagttggaaagaaaaaaaagtgacacaataagaaaggaaaagaaaatgctggtggctggaatcttctgaaagctctcttaatacatctggcagttgattcaggcctgtggctgagactttagctggaacatctgccacatggcctctgcctgtggcctgggtatcctcacaacatagtagctgagatccaaaggcaggtgactcaagagaaagagccagacagaactttttgcctttaagacttagtctcagaagtcacacagcctcacttcttacatatcctacttgtcacagcagtcccaatagctcacccaaattcaaggggaaggaaaaaaatttctacctctaaatggggtagtaactaggttctggaagagcatgtaagaccagaaatattattgttgtcatctttggaaaatgcaatcttctacaatatgacttaaaaaaagaaatactcttagttactaaatttaaaccaatggagcctattttgtgagaagtagcaagtaaaatatcattatctttactatagatttgcatttcttggttatagccatatgaagtcaaatctcttctgaaataaattagaatattaacttaacatctgtttccaaagacttgatggatttttaaataaataacctggaaacaaaagatggctcttactgttaaaaaaaataaaaagttaatgaaataaacagagaagtgacagtcatataaaatgttattagataaattcataaaatagatgtatgcatagtaattagaggtcaaattcttaattatgaaagttaacaggaaaacagggttatagacttcatagggttaataagccttaaaaatttcaaagggaatcttgaaatcaaagttagatactggaattaaagaatatgaagggttttgtttttatttttgtttttttattttgttttttgagatggagtctcactctgctgcccaggccatagtgcagtggcacaatctctgctcactgcaacctctgcctcccatgttcaagtgattctcctgcctcagcctccaagtagctgggattagaggcacatgccaccacacctggctaatttttgtattttttgtggaaacgggatttcaccatgttggccaggctggtcttgaatttctgacctcaagtgacctgcccacctcagcttcccgaagtgctgggattacaggcatgagctaccacgccaggccaaggatatgaagttttcatattatattgtggtaatgaaagatgttaacattggggcagaccgggtgaaggtgtacatgggatcttcctgtgtatttccatgtaacttcctgtgaatctgtaaatatttcataatttaaaaactttttgaaaagtgaaaaaaatataaagtttcagatttcatgaatttaacaaaagaaaaatagtttgcaattgtttcactgcctattgtagcaaaaaaaaccatttttgctatctagatttatatatttagtagaaataatgacactttacacatatactcccacactcacaaaaacaccgcatcaaatcacagaatatacagggaaaaatgcaggatgtagagaagatgtggagtttgttattccaagaaacatttgcttctggttgttactttctaagtaaggcctgttggatactataagcattttgcaagtaggcaaggtatagtatagtaaataagtaaattattttattggcatattgcttacaaatctaaattaaaaaaaaaaacaaaacagaaaactcaagcttgtaataatggggagttgtgatacagtctaagtgaatgtagaccttcactccaactcccgtctggaaaatcaccagagtttagaagcattttcatagttagagaatttttttttcttttgttgtcgttgagatggagtctcgctctgtcccccaggctggagtgcagtggcaccatctcggctcactgcaagctccgcctcccggggtcacgccattctcctgcctcagcctcccgagtagctgcgactacaggcgcccgccaccatgcccggctaattattttgtgtttttagtagagacggggtttcactgtgttagccagaatggtctcaatctcctgaccttgtgatccacccgcctcggcctccccaagtgctgggattacaggtgcgagccaccgcgcccaggcaagaatatttttatgatttaaaatgcagtaacgatgtcatttcttagactcaattgttttcatggatcttggtgagttcttgcaaagtggcaattgtgttcacatttctgcctaaaaccatgcaccctaggttagcaatgtgacttctttaaagccctgcattaattatacttctaataagattctttctatcgttgagccacttgcaacagcaagttttattctttgtcaagaacaaaaacactttattagctgcagtgattgtagccttcctatctgaagctcaaattaatttaaagaaatgacaaaaaaatgccttcttaacatatgaacaattttgattgtctgacaataaaagctggcattttatatgtgtatgtgtctctcaagttatttttaaattactaaaaatgctatttgctttagaccccaatctattttccatatatcttttgttagtgctcaatcatgaagtcaaattgtgtctccatttcctgtttgctttgagggtgatctactcttctttaatctaatcggactaaatgtgattacactcagggaagcacaaattcaaagttggatttttccactaattcttgacagccagatttagaggagtgtaaaataatttccccacttcctgtagctaatttgaataggaaggtcaagaatctggctatctgtccttatacctgctgtgactgaaaatatgacaaggttttgaaagcctttgttctgtgtgcccctgtgtcacttggaaaatacctgtgtctttttggggtagcctgcatcccctagtagttaattatttagttacttacctctgacagatctaacaaggtaggccttagaagttaatctggtggcaaaaggagtaggtttagaaaggaaaacacaccaaattgcataggatttgtcatcaagaaatttgagtataatgtactcttggaaactgagtgattggaagaaaaacctaacactgtctaaatacatgggagtgttgtaaactgcatagtaggactcaaaaaccaagactgtgctatgtgctagtatttctgctgtaaatgcctagtaattccttattcccaatctgtagttggaccttgaacactggctcacgcaaagcaagttctattgattttatttatatcctatagatacagaatgtgaatgcataccaataactgcaaaagcaagcagctaacgcagattagagttaacattagcaaagaaagatgggttggtacttatttttttgaaaaaccacagcaggaacaatttaatagctgactgaattgctaccagaaagacatgcacaggcacgtttgctgattagccgaggtccactttgttcttatttggcagattatgcaatagccgtttcccagaacattactaataatgctgcaagaattataagagaaagtttgtttacactgaatattttaaaagagattacagtcacctcaagttgctaagatagaaagtaataatgtagcatgcattaaatgcctattacattccaggcactgtgctatgtgttttgcatatacattgttcatttagctttcaagcaaccctgtgaggtagctgttaatagtttcctcattacagtgatgatgaaactgatgttctgataggctgagaaacttgttcaaggttgcatagctagtaagttgtggcaaatctaggctgttctgactgcaaagatcatgtttatttatgttgacaccacaatcttaaaatggaacaacagcctattggattactgaactgtagtgaaatgcaatataacttctctttttcatgttttcagcagtttgcataaataaattgttgaacaactattttaagattctaaagctgtggtttttgaattctagttcggataagaatgacatgaggagtgtgttccaatgcagacctctaagccttgtctcagagagtcttggggcatctaatgcagaacccaggaagctccatctctagtgagcattgcattctgatgtcattcgtccatgaaacacattttgacagatacaaatctagaggcatgtaattcagcccagaccactaaataaaagcttcattcagaattgttctgctcaatgcagtatgacattaggaaaaactttatcaggtgttgctccttgaaatagtcctttagggcatttattacattcccagattgaagaccaccatcctataccaccggagttagagaaaacctcatcaactgtacccaccaccatcatgtgtcattcagggatgggattatagcttagatggaagagttcttacatttcatgtttggtacattcattcacatttatttttcttaagaaagcataattccaatggttattctcttaaaataagtacttccatggtggcttaaagaacctaaagccacagaaatgaaaagcaaacaaaattaaaaacaaacaaacaaaacaaaaaacaaaccaaaaacagctaagagtgaactgacgtttcaagagtcctgctctataaggatttgactgaatggtgcctgtcccaaggatctgaaagtgttagtgtgcctgaaaaaaacagaagttagattatacattggggaaaattactttgattaccttagttacttcaaataccttaatactttcatgcaaacatataaagtgtatatccttcaagtggggttttccatggttgagaaacaactacggtatttacttagcacctattatgctcatctcctttccttccctcaaagcttcatttagtccaattaatgagataagatttggattgattaccagactgcttaagcttaatcaaccaacaaagactgaagagagtcatgaaagaagtgagagcaagaggaggaagggcatcccagtccttgttgttcaattacagcaattaactgtcaggtgcagaaaggaaaggcaagaacaagagcaaagaggaggtaattacacagggttgagcttggggatgcctttgcagaggtgcagacacgtttctgaggcaactctccagatctcatctacgaaaacaacaaatatatattatatatatttcctctctaaacctactccttttgccaccaaattaacttctaaggcctatcttgttatatctgccatatatatatatatatatgtatatatttatgtgtatatatatatgtgtgtatatatatacatatatatgtgtatatcccattatatattccataactgtagatttggcccattttctccattctcaccccgttatgaggctcaaatcatagttacagctggggacttcatttaatttgtttttaagaatctgtaactcataaagagatgactcagagcttggttgaacatctctaatgtttttgcttcccccagctcccacagcccgtaaagttaaaatatgttctgtgcttccaacaggtgaagcagagctttgatgctattatgctgtatctaacaatgaacctgttttgtttcttagtcatagaagtttgctgtatatgatgcatactcttttaggatgggtagatgctattgttactgttagtttgatcattttcttcaaagttttaaaaaataattaacctaattcttgagcatatgaattagagtgtcaaggtaacagacttttatagggaaatcttcagaaaatgtaggcagaaaagttatgatttatgagagtcccaatattacattcttgacatttcttgaagataggttctaaatcttcttgaacattttttcctgttttcaaaattagagaatggtaagttggggtcatctgaggaaagaagagttgtgagcaatggaatccaacctgctttttcatcacttctcttcagtttcagttaaaaatgtcagccttggaaaccatcattctcagcaaactaccgcaaggacaaaaaaccaaacaccgcatgttctcactcataggtgggaattgaacaatgagaacacatggacacaggaaggggaccataacacaccagggcctgttgtggggtggggggagggggggggatagcattaggagatatacctaatgctaaatgacgagttaatgggtgcagcacaccaacatggcacatgtatacatatgtaacaaacctgcacgttgtgcacatgtaccctaaaacttaaagtataataataataaaatttaaaaaaaaatcagcctcctctatagagacctcaagtaggtaatgcccagaggggagtctccacctctaagtgcctcgcccttagaaaagtattcctttctctttctttacctttaatttttcattgcctgaggatattcaacaaggtgttatctaattcgagcagttgacaatgaggtgtgaatgtcaaatagacattcccagaaggaatccttcccagaaggtgtttacattcctaaaatgtttattagaccaaaggcaactccctctttcagaatttgtggctgatttgtttttgtatgctctgttggcttttcctgccttccctcataaactaaatgacccagaaaacatcaacacacatcattcacacacaacacccatgaacaaataccatggaataacttttattccacagcttttggcattacaccaattcattccccttacctccgctctctctcctttttaagttactcttcatccctagcgaaagtgagttgcccttcaggaaagactttttctggaacgaatctttccaactgcagaggagcttttgagtatctggcaacgatgagtagtattactgacattctggttttgtgacgttgggcgggtcatagactctggagctgtttcctaatccataaaaagtgctcttattctagaaatctattattctgggagtccccttattctgtttattggctttgaagctcttccaatccaaacaatttctcccataaggcataggaaatgagcacttttacaaaaagcaagacattgaggactgaagtgagtcattctaacagctaattagattgttgtgcattttggatacatgtaattaatggaccctcctttaagaatagtgaggagaactgaattggcaaaatggacaaaaatagaacatactttggtttgtaaaagtttgaatttacgtaagatggtagtaacattacctcaattgttacacttcattacagtaaaatgctaagtattatattatgcaatgacaatagaaatatcactcagacacctcagaagtgtcattaaagatgtaggtattatgcaaaaatatatttgatttctacttgccttttcaaatgcttcaggcaaaaggtcagtccaagattgcggtgataaagctgcccccaccccaaccccttctttaattcaggaagtgactagagttttgttattgtaattacaaatatgataatttcctggcaaggaaatttttaaaaactgtgatgatgcacaaactagcattgaaaaatttaaaaaatgcattgaaaataacaagttagttgcatatagcaagtaagtagaaaatgattaaaaactaaatttagttacatgttactctttcctttttaaattatttaagaaaatacactaaaatgttaatcttttctctgccagggaaaatgcctctttcgtcacagtaattgacccaatacagatacagccataataaaacaattttgtttcctgagacccattttctttctctttgtgggtactttacagtcacggattttgggttaaatcacaccattttattagtgacaagaaggtaatttgcatgctttcttccttccttttttttagggtaaaaagtatacacatatagaaattaaatataaatcctcccccttcatcatgcagctgtcatgaaatgcctctgaaggattgtaggtgtgtagctctaaatttcgtggtgctacaggattcatatacatgtattctccattccttcagaaattgctggcattttttgtttgtttgtttctgcacattgaatttttctttcttcccttgattttccttttctgaagacctagagtcaacacaagtgccagttctcagctagagatcattgccaaggctgttattttaaaagcaagcctagtaatcagtactttgtttcctgttcttaagcaatctcagaagacaaaccaagtaggggtcatttctattccattgggttaaaagaaacctcagaatggaacacattgtaaggtaatgtttacaggttaaatttattgaaactaagtaactgagatagaaagttgtcaattgaaaaatatctctgtattactgtgtaggtcaaaaaagaccagagtaaacatcaaattaaataagcagcttgatttctgagcaaagtcccttcccttcttgctttctgagcaatgggatgaatccccctttgtgcatccctttctgagactgggcagggcagtctcgtgaattcctccgcatctggctgcctttaggagagagctcctagatagatgcttaccttacttattgctgtgagtaggagtttttttgtttgcttgtttgtctttctctttagtgaggtacactacaaaagaaagacttcttaccatgatagtaaggactgaaccttcctagatagctccctttattaatttgtagaaggaaggggataccattgttttgattgcctctgattaagggaacagctgttagtaatctgcaagacccgcttcctggtgggaataggtgcagcacaccacccatcccgaagtttgttgggatgaaggactaaaataacccagtgctgagactggagatccaacgtggcctcagcaagtccagcctctagtgctggcaaggctgcacctccccaaaagggtcaagttgaccacgttggcctttaacaagcaacctttttgtttttcggagatctcactgactaccccatctacctgacccaaaaggtatgctaattccctggctatcctgttcacaggagagaatctaaatattatacacagagaaggaagagtatgagttttatatatgatatagtaatggttttataggcagagattcaaaagatttttctgaaagcgtaatattttgatgtgttcgggacaatcaaatacctacataatatagaggaaataaactgttttaacttttatatagcttggtgctgagaaagaacataggagcaacagaaaatggaagattgtgttttttattttgctgtgatttcataatgatctatttagttattattaacatggaaataattgaagaattcagcagagttgtcacacagggtctagacaacacgaaataattgctagacttatgctttttgtttttaaattatttcagaaactaaattgtaaactaaattgcaggtcagtctattcagtagactgaaataactaagaacacatcttaatgacaggctaagatcgtattcagatcacctgtaatttaataaaggtgtatttattttatgaaagtatggcctcaagacttgtttctacagctattttactagcatcaaaaatcaaacaaacatatctttaccatcaaagagaggtggtttatatacccaaattgttttaggcagagtgcaagaattcacacttctagggccatctccaagaagatctctgaattaattatacgtgtggctctccactggcagagtatttgagagtattttggatgcagcttgtgtatattcttttttcttcctccatttcttctcatcatccctaaagctgcttatgacccattttttctattctactacagatatgcaaatctagttgtcatttctcacagtgtaattattgattatctttacttttaaatctttaaaatatggtcttttctcttctttattaaacttacttaaaaaaatctaaatttaacaatgggctaagctatataagcactgatacatatgcttttcaaacataaacttctgttatcctaccaacaaccttatgaggcaagtgccatcattacctccatttcacagatgaggaaactgaaaggagaatctagataacttgcccataaggtgatgattaaactaaacccaggaaattggatgcatgctgggaaccactgcaccacaaaattttctacagcttatgatccatacagtgatcccaaaatttgattgtgcataagaatcacctgggtatcttgttaaagccgattgctgatctgcttctgtaggtcaggattggagccaggaatttacatttctaacaagttcccaggtggtgctgatgctgctgctctgggcactttaaggaccactgatgtatgataatactgagactaggagcaataaagaactaattcattaatgttacttaatcttcattataagagttaaaaatactggctttcaaaaatggcaacttattacagctcaaaatctctttctttttgtttaaaagttacccctggatattatgcttatctcattgttttttaaattgaataatgtaaaactttatttcatatgttttaaagaccattttgtgaattgctggtccatatctttgcttacaaatgtaatgggactgaaaatttttctcattgattttatttaaaattctaagccaggtgcagtggcaagagcctgtagttctagctactcaggagtctgagacaggaggatccctgagacgaggagttggaggctgcagtgtgctgattgcacccatgaatagccactgcactctattttgggtacatagagagaccctgtctctaaatgtaaataaataggccaggtgcagtggctcatgcctgtaatcccagcacttcgggagcacaaagcaggtggatcaactgaggtcaggagtgcaagaccactctagccaagatggtgaaaccccatctctactaaaaatacaaaaattagccgagtgtgatggtacgcatttgtagtcccagctacttgggaggctgaggcacaagaattacttggacccaggaggtagaggttgcagtgagccgagatcttgccactgtacttcagccagcttgagcaaaagagcgagagatgctatctcaaaaaaaaaaaaaaaaaaaaaagaataaaataaaataaaaatttaactcatatttttagcacatattttcccactatactctttgcctttatgtttataatatgttggatatgtatttttgatttttatgcaatgaaacctattcctctttagttatttttaggcctaaaatgtctgtcttcattattaagcatatttactatattttcaggtagttgttatagtttattttaattccctaaaccatttggtatttattttggtgtaaagagaggttctcaatgattttttcttctattttcatttgcccgctagttttccctaaactattcatcaaatgatctttctcattttgtctagatagacacaagtctctttctggactgtgtatttcattgcattctatggtgtgttctttctctgttaccacattgctttaattaatgcaccttttacattttatttttaatatttgataggacaagcaatgtgttcccttcccttcttacttttccttttcatatctgagattttctacatgaggaagtcagaccgccctccttttctccagaaagcacccaggaagctattttttgacaataaagattacttttttttcttggattttgcacaaaaatctgtaagtgcaaagttactgctataataactagttagcattggaatagaaggagagtttcaggctggagacatcatggcagttgaaaaaatactctgttcttcttttattcttctctgttgcctttgcttcagcagatggtagaaggactcagtggtaataatggagacaaaaaaatcaatagaagcatccaaattatctgttatatatacttcactataggctaattacgatctttactattaaagaaacatgtaagcactgtgtaggttaggaaaacaaaataacgtacagttttatattataatgggaaaaaaatctttttcattggctgagttattaacagaatgattaaaatggttatgcttagcattcatccatctacaaatgaatggatgaagaaattgtggcatatatataatggaatattattcagcttttaaaaagaaggaggtcctgcgacttttgacaacatagatgaacctagaagacttgcgctaagtgaaaaatactgcatgacacttacacagtaaatctaaaaaaaggcaaatgcatagaaacagagagtgaaacagcagttaacaggtgcagagggatggagcaggttagggagatgggggacaaagggtatacagttgccacacacgcatacacacacacacacacacacacacacacacacagtatgtgaagagatgaatatgttagttttcttggccgtagtaattatttcactatgtgtatcaaaacatcatgtaatacaacttaaatatatacaataacaagttaatgtttaaaatcatatgttgaaaaacaaaagatgcttggcagtgccacaaaaaaagtgtttgtggattgttattctacccgagattaggcccttaaataatggaagtcactcttacaactgcggttgtttgtgaaattaatatttgagtcaggccaagctctaggtggagtaatcctataaagacaccttgctgaaaatgcatctgtggtttctcttcctgcctgatgtccatttggcatccacactctgttgataatcccactaagccttatcctacagcaccgtgaatttaagattttgtgccaaaaatgctcttttaaccatgcttttaatttaatttgaaaggtggtggattggactcaaattgcctctgaacctatattttgctgctcttggatcttcctgtgtcccctctgcacctccttcctctcacacttcttaatagctgctatttttttttaatgtggattttttttctcaaagctggtattgtttcttcctgaaaagaaacaacattgcccttgacactgcaaaacgaaaatacaaagaaaggtcatgctagttgctcgcttcagcttgagaagcgagaacatgtttttctcaaacctgccagcatctctgtgttaccttgcgtcatcccttgttccttcactcttatctcagtgggctgtgatgcttaaccttggtttttcacacacaccccaggttcaacactggaggggtaaggagctagaagctgctacatttgcttggttcttcttcccctgtttttccctatacacagctgtagtgctgtggaagaaaaaaataatttttcaaggatgtaaaggaactaagtttacaaggacattaggtttaggttttgtatcttatttttctccttgcccctgtgccctctgctcccatcacccatgtatgtagtcagtgctttgcacataatttgtgtgcagtaaatgtttcttgagtcatttaagaagactggtcctcatttaaggctacaaacgatgtttattctaacttttaaaccccacagttcctcccccttagttggcactgagtagctggatttccaaatggaaataaggcttaagtgagaaattgaaaaggacaagaaatcctatttgtaaaacaactgaaaaccatctccctcttattttttcagttttttagaaatatgcccttccttagagcctccttttttttttttttaaacttcagcagggaacttgtctgaataagggaagattttaaagcgaagtaaagtttagcaacctttgacccttttctgggtcttgagtgaataccaaatgagaatttcaagaattataaggttgaagatttaatgttgaatatatgggtattgggtcgtcagacacttagcacgtaatagagggtaaatagcagtgccagtaaatgccaaagagtattaataagtccatacttttccctgactttaaattgctgcatatgccatactggaggacaaatctgctagcccttaggaatgaatactaggttgtgggcccagcttttaaggattcaggattactttattcccagtaattaactaacttaattggcctgaacatgtcaagataaattgaaaccaatgatttggatttgctcagtaaatatacctttgaatgtctaaattccacaagaggccctctttcttagtgttgaagctggtggaggcaaaaggaaccatataaattaatgatcaggtttctcctggcttctagaaacttcttcgcttccctgtctttattaaatacatattctaataataaaagaaagcaatggtctgttctattcccttaagagaagttaattgctgctatcatgtttaaatcaataagagtaaaaacaagtataacaagtaactaacatttattgatgaatgaatactatgtgataagtgttggacacagcatttacataaaatatctaacttaatatttacagtgattctaggaggttttcattattatttttgtctctagtttacatatggctaaatgaagctataaagtggctaagtcaccttttgaaattctcgcagtaaatgatgatgctgggatcccgagtcggatctgttgcactcctagaccccaaagtctgttgaggaaattcatatttcttttggcctctactgaagagtgagtttgatttttttttccctagaaatcatgagaatagttaacattttttataagcaaacttttgggggttaacaaatttgatgttataataaacgttcctgtccaggcacggtggctcacgcctgtaatcctagcatttttggaggccaaggtgggcagatcacttgagttcaggagctcaagaccagcctaggcaacatggcaaaaccccgtctctacaaaaaatacaaaaattagccaggtgtggtggcatgcccctgtagtcccagctacttgggaggctgaggcaggaagattgctggagcccaggaggttgaggctatagtgagccgagagcatgccactgcgctcctgtctgggtgacagagtgagaccctgtctcaaaccaaaaccaaaccacaacaaacaaaaaacaaacatttcttactctaaatgagtcagaaaaatgaaaacattttcaccagtgattttgtttgtggtgttgttttaataggcatgagtaggctacaactgattcgtgtttttccttgaaatcccaggccaagaaattatttgattctagacctggagagtctcacacatctgtaaacatttcttgcttaaaaatctagtctttgattgtcttacgcagtataaaatggaatttaaaaaatattctttgtacattcttacacctatatttgtttgtcttttgtaaggctctttctttaactgatattttatgtgcttaagtaatgtcaaacctctccaatattgtttgcaagtttcaaaaaaatggtgtgattctcttggcaacttgctatgtgtatttctagtatggcaattataatttgtaatgagtgttttgcaatattagatatttgggaaaaattccagaaagttcaaagaacaaatcagaaataaacaagattatatcttgtgtaaaaatacaagaaattaaatgcctatgtaatagtgatctaaaaaatgtccatttaatttcttctcccaaattctagaattaaatttcaaaagtaacaattctggaagtttttgtaagttggacgatttttttccaacaaaaatcccttagaagttattaagatttttaaaattttttccagctttattgagatgacataaaaatcatgtcaatatatcttttcaaggtgtgcaatgtgatgagttgatatatttctcattgtgaaacaattaccacaatcaacactaggattttaataagataaaatgcctaattttctaaatatcgaatgaaaaatgtctcttttttttcaccaaaagtgcatctgaagcactttttataaatcgatatgagcactgtctttgtagacacgctggcactggggagcggtgcatttggctagtaagcagggggtaaggatgaagaatgagggaagaatagtatgcttttatagagatgttgctatagtgataatatcaggagaatgctgctaggagagttggaagttcccttggtgaaagctgtgtttggtttagatacgactgaattaggataatttaccaaaatcagtaaaataggtgagatatgataaaaacaatctacaagactccgggtatgataaaaggtactattttgttattgttgtctctatgtgtgtttctccgtctctttctctttctgtgtgtgtgtgtgtgtgtgtgtgtactctttttcctctattataatttgagttgaaatacttcgtaccaaaagatgaatgtgtggagtagactttaaaagaactctaaaagtttaaaatcttttcttcctattgtatctgaacctaaaactagtggaagtgaaatgaataatactgatttacattcatcattttggaaaacctaaaaccagcatttatagtgaaagcctgaatagtgaaaatttagatgattgatatttagagttttttaaaaaaatatatactttaagtcctgggatacaagtgcagaacgtgcaggtttgttacataggtatacatgtgccatggtggtttgctgcacccatcaacccatcatctacattaggtatttctcctaatgctatccctcttatccatttgtctgtcaatagacaggttgattccacatcttagctgttgtgaatagtgtgcagggcatatggtggtgcagatgtctcagtgatatactgatttcatttcctttggatatatactcagtagtgggactattggatcatatggtacttctatttttaatttttttgagaaatcttcatactgttttccataatgtctgtaataatttacattctcaccaacaatgtccaagggttcccttttctccacatcctcaccaacacttgttatcttttgctattttgataatatacatcctaatgcatgaggtgatgtctcatggttgtttgaacttgctttccctgatgttttgtgatgtcgagcattttttcttgtaattggccattcgtatgtattcttttgagaaatgtctagtcaggtcctttgcccgttttctttgtttgtttttctgctatttagtttttgagtttctaacatattttgcatattaatcccttatcaattgtgtggtttgcaaatattttctccactccctaggttgtctcttccctctgttgatgttccctttgctgtgcagaagctttttagtttggtgcaattctatttgcctctttttgctttgttggctgtgcttataaggtcatatccagaaaatcattgtctagtccaatatcaagaagctattttgcccatgttttcttctagtacatttatgatttcaggacttacgtttaaatctttaatctgtcttgagttgatttgtgtgtatgttgtaaaataaggatccagtttcacttatttgcatgtggatagccagttttcctaacaccatttcctgaagggacagtctttctccattgtgtattcttgatgcctttttcaaagattaattgactgaatattatatatgggtttatttctgtgctttctgttccaatccatgtattgtttttttatgccagtaccatgcagttttgatcactatagctatataatataatttaaaatcaggaaatatgcctccagctttgttctttttccttaaaattgcttcatggtctttgatggttccatacaatttttaggacttttttttctatttctattaaaaatgccgttggaattttgataggagttacattgaatctgtagatcatttaaggtaatatgaacattttgacaatattgattcttgtgatccataaaaggaaatatctttccatgtatttgccttgtcagttttttgcatcaatgctttattgtttcattatacagatcttttatctccttggttaaatttactcctaagtattttattcttttttatgctattgtgaatagaatatttttaaaatttattttttgaaaaaaatgtctttttggatagttcattgtttatgtatagacatgcaactgaattttgtttgttaattttgtaccttataacttaactaaatttatcagttataaccatttttttggtggagtctagggtttactctatttgagataatgtcatctgcaaacaaaagtctatgtattcctttctgattttgatgccttttattgcttttgcttgcttaattgatttgggtaggaatttcagtgttatgttgaatagaacatagcactctgtgagagtgggcagccttgtcttttcactgatcttggaggaaaaatgttcaacattttaccattcactatactattagttgtaggcttttcttatgtggtctttattgtgttgagatacattcctcctgtacctaattttttgagtttttaatcataaaattatgttgagttttgtcagatgcttttcatgcatctattgagatgatcatacgacttttatctttcattctattattatggtatatcacattgattaatttgcatatagtgaaccattcttgaatctcaggtataaatcccatcgaccatggtcatgttgaatttggtttgctagtgtttcattgagaattttcatgtctatgtttatcagggatattggcttgtaattttcttttcttgtattcttatctggctttagtatgagagtaatgctggccttataaaatgagtgtggaagtggttcattctcattaattttttaaacagtttgggaaagattggtattagtttttctttaaatgtttgatggaattcacacataaaaccatcaggtcctgggattttctttgttgaaagattttttcttactacttcaatctccttcctcattattggcctgctcagattttctatttcttcttcttcttttatttttctttttgagatggagtctcgctctgtcacacaggcgggagtgcaatggcaccatctcagctcactgcaacttctgcctcccaggtttaagcgattctcccacctcagcctcccgagtagctgggactataggtgcatgccaccacacccagctaatttatttatttattttttgtatttttgatagagatggggtttcaccatgttgttcaggctggtcttgaactcctgacctcaagtgatctgcccacctcggcctcccacagtgctgggatttcgggtgtgagccaccatgcccagccttctatttcttcttgattcagttttggtagattgtacgtgtctggaatttatccatttcttctagattatccaatttgttgatatacaattgttcatatattctcttatgatcccttatatttctgtagtatcagttgtaatatctcttattttatttatttgaatctcctctcttttctttagtctagctaaaagtttgtaattgtgtttatcttttcaaaaaccaactcttagtttcattgattgttttctcttgttttctagtcttgattccatttatttctgccctgatctttgttatttccttccttctcctaagtttgggcttagtctttctctttttgctagctccttgaggtataaaattaggttgcttaaaatctttctttttttaaaaatgtaggcatttattactataaaccatcctcttagaacttattttgttgcatctcctaagtttttgtaggtagtatttccattttcattcatctcaagatattttttggtttcccttttattttttggcccattgattgttcaatgaattgtttaatttccacatatttgagaattttcaaattttcttcatattactgatctcttgttttatgtttttttgtggtcagaaaagagaagacatgatttcaactttcttaaatatgataagaggccagacagcaatagctcatgcctgtaatcacagcattttaggaggctgaggtgggaggattgcttgaggtaaggagttctagaccagcctgggcaacacagtgagaccctgtctctacaaaaaaattttaaaacattagctgggcattgtggcactcagctgtaatcccagcagctactcaggaggctgaggtgggaggattgcttgagcccaggagttctaggctacagtgagtgccactgcacactagcccaagcaacagtgagtgccactgcactctagcccaggcaacagtgagtgccactgcactctagcccaggcaacagtgagtgccactgcactctagcccaggcaacagatgcgaccctctctctaaaaataaataaataaataaataaataaataaataaataaataaataaaaattaaatatgttaagacttgttttgtggtctaatatattaatatattatctatcctggagaattgtctgtgtgcacttgaaaataatgtgtattctgctgttgctggatggaatattctatatacatctgttacattgtttaggtttatagtgttcttcaaatgtattgtttccttgttgagtttctgtcaggatgatctatccattgtcaaacgtgaagtactgaaatctgctactattaatcatattgctgtttatttccttcgattctgttagcattcattttatatatttaggtgctccgatgttgggtaaatatatacttacattattatgtgctcttgatgaattgatccttttgtcattatataatgatcttctttgtctcttttgacagtgtttgacttaaaatctacattgtgcgatataaggatagccatccttgttctcctttggttaccatttacatggaatttcttaatccataactttactttcagactatgtgcttccttaaagctaaagtgaatctcttgtaggcagcatatagtttgatcttatactttttaatccatttggccactctttgtcttttgattaaagaatttagtctatttacttttaagataattattggtaggcaaggacccagtactgacaaactgttgttttctattttggagttactttattccgttcttcctctcttgccatcctcttgtgatctgatgattttttttgtggtggtatgttttaattcctttatctttatgtatctacttacagattttttctttgtggtaacatgaggcttacatgaaacctcttatagttataatagtctgctttaagctggtaacaatttaactttgactgcaaacaaaaactacactttaacttctcctctccccatgttttatattattaatgtcacaatttacatctttttatattgtgtacccattaacaaattgttgtagctttagttgtctttaatacttttgtcttttaacttttatatcaaagtgacttgtatggcaccattacagtattaggatattgtgaatttgactatatgttacctttacaatgagattttactttcatatattttcattttgttaattagctttcttttattttaactcaaagaactctaacattaattttttgtaaggtagttctagtagggactaacatccacagtttttgtttatctaggaaggtctttatcactccttcatttcttaaagacagcttttctggatatagtattattggttgacagtatttttcccccaccagcactttgattatattatcccactttctcctggcctgcaagtctctactgagaaaactgcttgtaatcttacggagtttcccttatacataacaaatcacttttctctagttgctttcaaaattttttgtctttgacttttgaaaatttgattataatgtatcttggtgaagatctctttatgtttaatctttttagggctcttggtattcatggatattaatgtttatttcccagtctagatttgggaagttttctaacattattttttttaaacaagctttcttcttctttctccatctctgcttcctctgaaactcacataatatgtatattgattagcttcatggtgtttcatatgttccataggctttcttctccccttttcatcctttttttccattcttgatcctctgactgaataatgtcaagcctgtcttcaagctttctgattctttcttctatttgattgaacctactgtcgaagctgtctatgcaatttttttcagttcagttattgtgttcgtcagctccagaatttttgttttgttcttttgtatggtttctgtctctctgttgaacttctgatttttttcaggtgttgtttcctgatttgggttagctgcctttctgtgttctcctttagctcacttagcttctttgttagaagattatgttaaattatttctcaagcagttcatagatatccatttctttaaagtcagttactagtattttacttgcccctttggtagtgtcatatttctctgatatttggtttgttgtggccttgagctggtgcctatgcatttgaagacataggcacatttgccagtcttcagactggccttagcagggaaagcccttcatcagtcagcctgaccaaggattctgaaaaggtcagctggaagggttcatggataggcatgctgctgaaatccttgggaggactggcctgatgttttcgtcaggggacagatggtcctctcatcatcttagcttataggggctgagttgatattttggaccatgggagtaaagctgggactatggtccattgtggtgggcctggagactgggtctgtggaggatggcctaaaacctgagtccacagaaaacagtcaggcagtggggtgggcttttggtctgagttcatgggggtcatcctgtactggagttggtctggcacttgggtctgtgagggcagtcctgaaacacagatctgcatgggcaggcccaaatcctcggtctgaaggggccaacttgacactagagttcactggggcaagtgctggagtctactttgaagtcaagtgctcacttcactattctccctcatatggaagttatctctccatggtatgcagtacaggcttgggaagggggtgatatgggtgggtaatataaaactgttcttcataccctcttcaatgtatgtgtttatttctgtgctctactcaggcactatattccttagctctcaggcagatatttttgttgcatgtgaatgggttgttcaaattgatgtctctgtgaggaaatgagcactggaaactgctattatgccatcttgctgatatcactttgttttcagatctcttttaaaatgtgagggtgcctcagaattttacctctttttcactatgtttacatataagatgataatcagatgcactcaagtttgcctctggcatcacagcagtttctcttcagtgactaccttcaggacataggtagctgaaccattttccttattaggaaacaaatgtagatacagtagtaagttttattctggtttttctacatggaatttactgataacaagcttactctggatgtagattctcatattttctaaagttttatataaaatatatcatgcattcttataactcattgaaatttagttatgatgtttgtttatatgtaaaaataccaacatgttatattgttatttatcaaattacatgaattcattcatgtctttacatcattgcaagtaacttttcttgggttccaattgttctgggtttcagtgaaataatatacttgcttaaacatatactaatttaaaatgcaatcaggtattgcttaacaatgaagatacattctgagaaatgtattattaggcagttttgtcattgtgcgtacatcatagagggtacttacacaagcctagatggcatagcctactacacaccttggctatgtgttaatagccttttactcctaggctatcaacctgaatagcattttactgtactgaacactgtaggcaattgtactacaatgttaaatatttgtgtgtctaaacatatctaaacataaaaagtacagtaaaaatacagtattataatttcatgggaccacagttgtatatgtggtccatcattggctgaaatgttatgtgatatatgcttatactgggggaacggattgagaatgtaaacagaatatcttttccaatttccccaaagacacaacatatctatgacaaagatataataattgtaacaaaaaatatgagtttattttaaaatcaagagtctctattttacttctttgctcttcctaagatttctcatcatgttgctttttcaaaatctcacttcccatttatgagtatttgaaatataagtcttcctcttttaagatgtcttaaacctcattaccttctggtgatttgagaagtaactggttaaagacaaaagaaagtgatgggtctgtgtaaaaattagaacttaagtcctacctacaaacatttaaattaaaatgttttcttggaaggttgcaggatgaaggaaaatacatttggggcccagattctgcctacatgccactacttggcaatccatgttttttatttgtgtaggctcttgggtgatgatgtttaagaactggaaaaatggtatcatattcaggagaaatagttatgcaaagggtggatgatgatatggaggtcagaggggagaactagatagtggctgccaaagttgtctggttagagaagtaaaatggtaccttagataggcaggctcagagggtagaaatatacaaccaagtttggttggttaaactgaggaagcatatgaattagtaagaaactgataaaaaaaactaagatgtctaagatggtttggagaactccatgattggctgcctcaagaaagctatggccccttccctgtccttgcactatcgatcttttgatccagaagtcctcagacttttgatccagtcctcagaaaagtgcaaaagtgggccttgaacactttgttcattttgaaataaatggaggaggcagcatctcttggtggtcaagtgtttggctgtagtcccaaatagaaataggagcaaatcttgaccccctttgaatgcagtgtatcgaacatagcatacaactaatgagaactactgatctcattattattgggaccgtgctgctattctcattgttactgggactgtttaaatttttagagcttagtagttaacattgtagctggtgcagcagatgactggggcacagtgcagaccatgcccctcagctctgaggccctcattcccagctctccaaatgttgcctgctgaagactcacagctgagcctctccccaggactggtcctcagccccggggatctgcctttctcaagttatacctcctcccagggccaccccatatccagcaactggccaatacctggatgcaaagtcccagccccttgccttcattttggacatctctgaaagactctcctagcttcagctgcataattgcatgagtccagcatctccctgtgtcctaattctgcttctccacacttaaagtttttagttcttgagagcacatgctaaaaaacctcctgctgacaaaattccttctagaatttgtttccctgttatcctgacctgtgacacatgatataataataataccaaggcagatgcaaatatagacatgtgaaaggaaaattattctgtggattcataggtgagccagttcccataaacatttcctgctctgttgaggaggctcaagtagtagtaagatgggctgagaatgaggatagacaaggttgaagaactggagataggcggtcaagatgtccgtggataggagaactctttatagtttgtagctcgggaagataactgagcatcatggcctagcttggaggtgctctattgaccagctggattctggccatatcgtttttaatatagtacgggggaaagggagtaaggagggtttcatttgactttggcacttgcttgctgagatacccatttctgacacggtttcctcatctgtgagttgggaattgcgtctacattgcctatctccagataggttgtgatatgtaaagttattctggaaaccccaatgggcaatttggacgtgagagtagaatgaagtgattgaaggtatgggcttttgagtcagacagatatccatgctccacgtttagtgtcttgtgtcacctcaagggagttgatgaacctcgtttgctccagtctctttacatgtaaaattggtgagggtggaggatattttctcatacggttattgcaaagttttaattagataatatgtgtagtaaatatatgcaacatatgcctgccacatacattctaaatagaagatagatttctattattattaaaagtaacctttaaaattattcattactatacgaataaacttgagcatgtgaggttggattgacactcaggaaatttatttgtgacatccaccagctgctgtctcatgtggaaacccctgcagctgccgcggtggccacaggttctggagtccagtagatcttctattatgaggagggtcactaacgccacgctagatctgaagcagcggaaagcaacagcaccacctggtgctctgtgcaggattaaccactgagtgcaggtcttccaagtggctaattgaattacatggtgggggttgaatttgagattgcaatttctaacactggctctttaaactctgtgatttgaccttatttctcaggttcactcttttaggtgcttgctgtttttcatttcatctccatctgagatttatgagttttgttgttaaaattgtagctctctttacgtcttgtcaaggggacaggtagtataaaatataggtgaaattgtgtcaaattattgtatccgtgctggatactgacaaaataatatataaatatataatataaatatgtaaatatataaatataagtatttatatgagagagggagagagagaaggaacatttagatcacagggtgagactaagaaataatattagcagtaatttgaaatgcaaaatcccaaaatgtgaaaatgtaaaattgtaaaatcctgaacctacttaagataaagagcagtaatttgatgaaaagcaacgaccaaactttgaaagcactctctgagaacagtcatgtttgtttgagagaactgtgggttttttaaaagtctggattaaatattggacataaaatatacgaacactgtgaccagcttttctccccccttttccccattccacaccaaacaatgtattttgaattgttgaaactcttggtattggaatacagtttcaggttaaaataaagtggttctatgaaggtagtatttcaggacatttttcaagactccctttctttctggtgccctggtattgctaagagctcataacaggaaaatatttcatagttttggtggctttcttgcaaaagcaggagacgccacattttacaggagggagctggctacatgtggcaagtttgtccagcctcagcttgaagtccttctcaaggcttctgtgtgtgctctctgattggaaataacctttcatccaagagatcagttgtcttcatgttttcattaacatgcacctttatatgtaattcagtaggaaaactcttagatgtgaaggcagcattttctccttagcttccattgtagcaaacagtaggagggtaggctttcatgttttccacaagaataatctttaatcatgtagaagtgatattttttaaatatactaatatatttcatgtcactgttctgaacttttctttgcatttacaaaacttggactgtgatgtaattctttttgattcctgtttccctgatggactctcagggaccaaacccatcctctcagattgcatccacagctggtcagcagaacggctggtacatgtgaggggcacagtggaattcattaaattagtgaatcaaataatcagcaaattgatctggtcaaaattagattagggtaagagtctgactactaaatactgttcattattctgtaactcttcagccttcattccagtttctagatttctggcgtatttcctcacccccactattctttagcttccttgttcacatccgagttaatggtcttctctgtgtacgtggcaggttatttgtgagaatccaaatgagaaatgtatacaaaacatgaataagttcaagtgctgtacagatacaaggtaaaaggtattttcattactttactatccgatcattgtctcctgcaacattatatccacaaatagaggaaggaaaaggtgtcaggaaaaaatccacaaaagttctgcttgaaactgttcaaatgtggtcttgatttagaactaaaaggtttgaagtgccacaataagctgtgctgtttttcctcccactgtattgattgctttgtgctctctattgtgattattactctctgagtgcacatctccatccctgcacttctgtgtgattcacacaaccctttatccgaaagtctaaggaccccagctttgttttcaaactcagaatcttttggattttagaaacgtgatacggtgcacatactatttattatggttcactctcaatcagagtctgtggcagcaccttgcaatcaaagacgttgatatttctgcagagaaaagtatgaattttcacattaagtggaataatgaaagactataaatagtcttttctcaattcaggtcaattttttgctaccaaattatttactacaaagttacaaaactgaggcccatccaaggcttcaaggctgatgcatctgtcccctcctctctcccacacccccatacatacgagatgacaaattcttcgtgagatgaaagcatttccacattgttgtcaccctagaagccaacccagtgcctagcacattttctaatatatgtgtccttatataactgccaccattgtgacaaatacattaaaatttggtaaattttaatatttttaaaatatttgttttttaaaaaatagattttgctttatatagttctaaaatattttttagaggttaagaattataagataaatcaaacacactatcagatctatccaccctctcccacttataccttcccaccacatgagaccaaactttccagatttgaatgacataatttcagacatcataagatactttaattcatattggaaaaatcgtgtaatttctatgtaacctttcagcaaaagtcttagatttactatattttgtcacttttcaaatagatatatcactagggtgtagggtactgccagtatctaatgtgtaaaggccaatgacattgctagacatcctataatgcacaagaccacctcccacgacaaagaatcatcttgcctaaatgtcaatattgctgaggttaagcaactgtaacttaggaacggagataattatattcctttcatcccatctgccttagatttaaagtgaaatgatactacattttgcaaatataactttaatgaaattgggctctttcaatctagctactggtttcaaatacaaaagaaatgcaactccaattctgaaagtcttaagagcaatgtaagtctttactgacattcacttgaaaaaaaaattgaagcagtcattagaggactcaacacaggcaagactccctaaaaattctcttaactcatcttttccctcaagcccacagctgtagatagctattaattttctctcttctcgtctgtcccttcgcatcaatccatgtcagaactcatgcagagtaactttggttgcccttgttctttgcaacttttaatccattacttgtctgattaaaacaggaaaggcctaggagacaggcccaaagaaataagcctagaatcttttcattatggaaaacagagtgagggaggaggagaaggacccctccactcccaccgcccccccacacatgtaaatgcctttatttcagttagcctttgctgtgtaacaaactactccaaaactctgtggcttaagccaatcagaattcatgctttctcacagtatgtggatttgctggttagttcagttaaatatggatggtttcataaggacacatatataagacaatataccaggcagggggctgatctttaggaatacgatattgaggaaaatgctttcttcctacaaggaatttgtatcaagtatgtatggatgtgagagagaggaggtatcagacacatcagcctcgaagtcttaggcctcagtttgttgacttcacttgggttcacctgtggctgagttcatctgcagggctgactgagcttgaagatccaaggtgacctcattcacgtgcctggtggttagttctaggtaacaaatgagacatctgaattcttccacagatggaaacatcttctaatataaactgctttctttgcacagtggttttaggatggagatccaagacagctaaaacagaaacttcacgacctcttaaggcctagaatcagatgacataaagtaatttctgctgcattattaattaaagcaagtaccatacgagttcagattcaaggggaagggaaattgattctacccctggatgggaaggacaaagtcaccatacaaaagaaggatgcatagttggaccacaggattttgtggccataatttaaaatctgtcctctggtcactactgtttgttttctttctgcatggaaagtacattcatccattctcaaggtatcaaaagtctcctccagcctttggtttggcatcaagctctaagtcctgtgttgcatcgtttgcatcttgtccagatagagatgaggttcctcaggtgaaatttctctcaatccatagacccgttaactaaaaagagaagttacctgctccccacttcttcaacatgcagtgatgaggcaggagtggggtcacttcaatagatgcttctgtccaaggagtgagagaattgaacagagggagcaattgtggtccagccattctgaaatccagtgagccacacgtggccagttcgttttgtccaggggcaaggcatgttccttgctatcttggtaagagatggctcaagattgcaactgatagttttcttagccttcttcctagacacacaaagttgtggttccagtctcctgttcatttggagtggtgctgtcccttcagtgaaagctggcttcctaaaaacttgtctgtagtgcattctgtgcccccaaaatctcagctttgaaacaaacattggacacatatgaggctgctgtgggcagtgccctaaagattcttagaagctggtttgtctagttgagaaggtcaactgggcactaccttaaatctttccaaatgttctcttttttccccagccttattgaggtataattgatgaatacaacttacatatatttaagttgtacagtgtgatgatttgatatacatataaattgtgaaatgattaccacagtcaattaacacatccattatgacagataaagaaaacatgacacacacatacaattgaatattattcctccataaaaaaataaggaaatcctaccatttgcaatgacatggatgaacctgaaggacattatgctaaattaaataagtgagatacagaatgaaaggtactgtgtgatatcatttatatgtggagtttaaacaagtcaaactctttctgagttttcaacaatactcatacctttgatttgctgttaccctgaagcgttttcttactttgcaaatcttttttttggaaagactaggaataagaaaatatcttatttttcagtccatcatatcctaggcctctgtgtttcctctgccttgtgtctgcaaatgaaacagctcatttctgtctcttccagcaccttataatgttcagctaaaagaagccacctgacactttcagcattctgcaaggaaatctccctagccagaatcatgagttcaagttactgcaggtgacagaatatataatgtacaaaatatgtacggctctttctccaatttccaatggcggttccctcactgcccaatcagcctccgctaataggctctttgtgtccttccaatctccttcccctatttggtcgcaagaccaatgccatatgtcttagatttttgttagagcaacaccacactcctggtagcaatttctgttttggttagcttttcctgtgcaacaaaccaccaccaaatcttagtggtgtggagcaacaacagtttaggatttctcatgtttctgtgagtgagttgggtgttccttctgccagctgtgcctgggcccattcacatggctacatgctggtggggtatcagttggactggcaggtccagggcggctcactcatgtatcaggcagctgttgctggctgccatctgaggtacctcagttctcctccaagtgactttttttcttttcttttcttttcttttagctgtatttttactcattgaaacactaggtgaaatcagggtaaagtcaactaaaggaaaaatggttatttcattcatttgtacttaaaccagtcaaaaaagtacaaatgtcattatgatgcagcaaatacaagacctctttctacaaatattagcacaaccaacaaattaggggatatagtaaaacagagccaaaaagggtgaggaaatcaatgaagtatgttacagcttaactctttacctcaatagagtttttaaaaataagtaaagcctcccaatccccaaaaataggaatataccttcatcacaccaatttgtacttttatttcttattcttgaggtttagaatctatcctccaagtgacttcttattcacgaggatcttagaccagtttccttgtgtagaggtctcagagcagagttgaattccaatatagccaaagtggaatctcaagtcctcttaaggcccagcctcagatgtcacttaaaatcacttctgtcatattattgatcaatgtagatctcaatgccagcccagactcaaggtctggggaaatgagaccacctcctaagagaagaggcaataaaatcacattgcaaaggatgcgctgatcacaatgggaagaatttatggtcatatttggaaatctgccacagcctggtcctgtaaatgtctttcatttatatattcaattttaaaatcttaacattgagtagttataagcacctgtaaattgtccattttcttgtgttggactattcaatatactttattccctacccatatataataaagttagtggtaattttagtaattgtagatatgcaatccggataatataattctgttcccaaatcaagtcatttgactgtgtttggtaattaataatcattaccttgtcactgtatgcctttgctgttgttttcccctttgtattcacgtcatttggttgtgggaagaaattcaatctgcatttgtctattttttcaatttcattccaatattttattgaggtgtatttgcctgcaatgaaaatgatgaaaaatctttattagatactaccaggaataatgtgattttaaatgtgtgatttgttttaaatgaacatttacatttatatttttagataatttaaatccttaagacatgtatttaagctatcattatcattaaagaaacctattaggcataataacaatctgcaaataaaaccccaaaaagtttatcataacctattgcaagctcctataaatgtatcaatgcatggtactatttatgtatttattttgccagagattgcaatttcatgcttacctatatataattatgtaaacagcatttctttcttcttagtattaattaatttatgtatttttgagatacaattttactctgtcacccaggctgaagtgcagtggcgtgatctctgctcactgcaacctctgcctcccaggttcaagtgattctcctttcttagcctcccgagtagctgggattacaggtgcccaccaccatgtctggctaatttttatattattcatagagacagggtttcaccatgttggccaggctagtctcaaactcttgacctcaagtgatcctcctgcctgggctttgcaaagtgctgggattacaggcatgagccacagcacccggactcttcctggtaatatatatattaaatgtgatattaattacagatggatacttctagacatttactattttgctctttatgatattttatgattctgatgaaaatacattatgcattattatgtacatactgatacatgagatgctatatcactcagtaataaattattatggaagaatgtattcaatatattaaaatatactaatttcatttactgtccaaattttaaacataccatctgttaagtggatattgtcatgtattttaacatttttgtaatttagtaaatctatttaaaaggcagtggtcataggaccctgtgacacagttttacatcacatattagttggtacatttgttatgtaaggtaaaattaaaagtatatttaacatgtttctagacaatatattatttgtgattgattgcaatggctgcacaataacccaagccaccttttattatgatctttgtgcttccgggtgcatgtttaagtcacctagagtaaaccacaattgtgcagtacccgcaggtgactattagtataactcatcaggaagaaaaccatgtgaactgtcatcagttatgatagtttcctaatagtcaaatggaatcacagttgctaaattgggcctcatttgtgcatttgttgtatgtcatgatcttgccctgaaatggcaaaacactgagaaaatatctaaaaatgggcaaagaaatgcagaaattgaatacctgagccagaacccttttttttttttaactcatttctacggagggatactacggtataatattacccagagctaggtgtttatatagcctcagctgactccaattcctgaggcctgtaggaccaactgcttttgaaatacaagcaatgtgagcctcaaggatgaaggacccagagagtatttggaactcctctgtggttgttgcttttaatgttacacggtctggcctttaggaaccaattacgatttaggttataagagagaaggagaatgtgaaccaattctacccagtaataatcacccacaccaaaaactggtcttaaatcagagcctatcacagctgtgcagcacccaaattgtagtgtggcttccccagccacacctctcctctaccctgacgctgctgtcatctcatccattttacgatgcctttgcaattggtctgaattctcataactcttcttaagcagaaaagctgaggacagaaacattgttaataaagttgttacttgttaaatatatttaaactgttttcttaaatataatgacatataaagtcatgtgtagcttaatgatggagttatattctgagaaatttgtcttctaggtgaattcatcattgtgggaactctgtagggtgtacttgtgcaaacctagagggtatagactattacacatctaggctacatgatatagcctattactcctaggctacaaacttgtacagcatgtgactgtactgaatattgtaagcaattgtagcacatggtaagtattttgtgtatctgaacatgtctaaatatagaaaaagcaatgggttgccctacaatggcaggacatcactagacaactggaatttttcagttgtgtttataatcttatggcactactgtcatctatgaggttcgtcattggccaaaaaatcattatgcagtgcatgactgtacttaagaactttatagacctagtcgtgaaggttcattttgttccctgtcaacagcattaaaaagaaatgttattgttcattaaacttttaacacaagttgatagacattcgttgcatgtttctgttacttccacaaattgaacattttatgttgttggtatcagatttaactaccaaatcttgggagtaaggttttcaagttttacataaaaaatgagggtttgctgaataattaaattaaacaatttttttctttcaggaaaatagtaagtaaaatcagaaaaatatttacctagaattcagctgactacgtttgataatacaaaaagtgaattgtaggacctagtaaaatctgtttttgcaaccatagtaaaaaaggaaacacgtaaagaatttaacatttaaatatatgctgtgctacaaaaaagataatttgaggattctaaaaaaggccatttagctgaagtctaactataaactcagagatttaccatcagatgaaattgttacaatactatttttatttcattaaaggttataatagtgaaaatataacaatttatattaagaagtaatatatcatcagattatatatttaattttatgacagtataacattaacatattatgccaatttatattaacatttttaaacagtggtattttgtgatgtttataaaagaatgtataatctcaagttgagtgtaaacaatttacatataatctaactgtgtctattttagattttgaattggattttatgcattataaagttccaaattccatccaacctaccttgattggttaagatcattttgccgctacctaactttatttatacaacctaaagattctcaggtcaaaaaatttgaactataaatttataattttcatgagattaatatttgatagatgaatgtggtaatttttatgctacccttgagtgacagtataatggcatagtatactactagatatctgaagtctacaacatggctgtgctgctggatgaccttggtagttcagtgtcttgacagttttatatgtaaaatgggcattataatagttgctgctcatagatcttgacaagaattaatggattaatacttatataatattacatgtaatatataatgataaataaatgataattaaaatatcaagtgattgatttatctaaatgtcagtgcctggtatataggaagtgctacttatttttataccaatttgttttttatatacacttgaaaattaatgagcatgttaaaatatattagaggtcatggattctgtcaattttatagatagattcaaaatttctccaaattaaaaggttttgtatttattttctttactcattcattcttattggtcatacttgcaggcattgggaaccaagttgctgtcctcctgggctttacattctagtagacaagcaaatggtctgggctgaagcacagacaaggtcagagacaaagacagagatttgggtatcatccctcaaagggcgagggattgaaattatttcttgtgtatgtcccccacaacatagcgtttactagtttgtgaacagctgatactcagtacatgctggtggggtggataaaattcaattcttcttttgaaggtattaaactacttctgtgtggcttttctctctttttttttcaacttttattttaggtgcaggggttacatgtctaggtttgttacatgagtaaattgtgtgtcgctgagttttgtgtatgaatggtctcgtcacccggttagtgagcatattacccaataggtagtttttcaacccacaccccctcccaggatacaaaatcaatgtacaaaattctgtggcatttcttttcttttttttttttttttttgagatggagtctcactctgacgcccaggctggagtgcagtgatacgatctcggctcactgcaagctctgcctcacaggttcacaccattctcctgcctcagcctcctgagtagctgggactacagaggcccgccagcacacccggctaattttttgtatttttagtagaggcagggtttcaccgtgttagccaggatggtcttgacctcctgacctcgtaatctgcctgcctcggcctcccaaagtgctgggattacaggcatgagccgccacgcctggccaattcagtggcatttctatacaccaacaacttgtaacctgagagccaaatcaaggatgcaaccccatttacaatagtcacacacacacaataaaataccttggaatacatctaactaaagaggtgaaagatctatctctaccagaagaaccataaaacactgctgaaagaaatcatagatgatacaaacaaatggaaaagcatcccatgcttatggatgagaagaatcaatattgttaaaatatccatactgcccaaagcaatctacagattcaacgctgttcctgtcaaactaccaacatcattattatctctttatacctctaattaaagcctatccaaaccctacctcttttcctttctatattagttcctcttgttacatagcaaagtaccgcaaaccttgaagtttaaagcaacaatcatttattatctccaaatggttgcatgtcaggagtccatgcaaagcttagctgcattatctgttcagggtcttacaaggctataactaaggcatcagctggatttcattcttatctggatgctcaactgtggaagaatccacttttgggctctgtcacaatgttaacagaattcattccttgtgactgtttgacaagggcctggtgtcttactggctgttcactgagattgcacttcactcctgaagggagcctctagttccttgccattgaccctctgcaaaggaacttcacagcctagctggttgcttcttctaggccagcaggagaatctctcactccagtcagctaagctggagtatcataaagtaacatgatcacaagtgtgacatctcatcacctttgtcatatcctattggctagacacaaatcacaggttctacccacattctgccgacacaaaaatggggactccatgtggtgggaatttttggaggtcactccagtgtgtagtcaccacattctcatctgggtgaagttccttttttgcttcatgtatacggctctatcttattgcattactgtgtaaccctttactattcatagcccttgcttgtccatttccacctctagatattttatagcagggaccttgccctattcaaccctctgtattcctttgcacttagcataaaattcagcacttagtggtcttggtgaattttcatttttaacagctttgttgaagtataagtcatcagtgaattttaagtaagtggatgaaggtaaacatagggctaacaaatggcaaattttaaagcatttgcagataatttttaaaggaatagtctatatgattatgtagatcgactcttgttgacttttcccttcaagacaataattggtaaaatgaatgagaaaacgatttcacgattccttccagatttgtgtaaataggactttttctcattatacagcttcatgaaatattacattatttaaccagatttctttttccttctagatgagcaagagatagtacaaaaacgaactttcacaaaatggatcaactctcatctggccaaggtaaaggaaactacccagcattacaggtttacttaggttgagccagtaaatcattaaatgtccagtataacaaaatgcttctgtccctgttgtcactgttgcgaatcaatgatactgtaatcttattggttggtctagctgttgcctaagagtggaatttgctaacattgcttctgggaagaaatgaacttatagctagagtcaagagcagttacttcatgtcaattctgtgaatcttgagaaactatttcatccaattattttttctaatactaatgtgtgtgtcatatcaaaaggagaatttgtgctggatttttgtttgtgtgtgtttgttcctatttggaacacaaagaagctataagtgatctatgctaagcaaaagattttagctaaagatattatgatagtatcagtgctctcatctctggtgctttgatttaaaaaagtaaccatggtaataggacatgaaaaggctaaaatcattctagtattatccactctgtcattcactgatattaggtgactatatgtctatatattataatgtctttgaacataaatactaatataaaataaatcttaatcttgatacagtataataaaattaatctcttgtactgctgatgaaaaaataagcaagccaagagacatcatatttgtaaaaataaattcagatgatgggacaattgtgtctgaattcagttagaggatttgctgataatttttaaaggagtagtctatatgattatatagtggaagttatgttgactctcccttcaagtcaataattggttaaatgaattagatgataaaacaattttatcttcaaattttttattctcacttttgctgagagtggtgcctgtagtatgtaaagcccaaccctacaagcaggttttgatcaggggcttccccaaagccattttgatagcgcagaagcaaacaaagcatgacagttgattttagtcccattctacagattcactgcttactttgtgtctgcgctagcctttgaagacaggaaaaaattagtaaaacactttcccaggccccgagaagcttgcaatccagccatgaaagaagcctagagcgacctgtctagatataggataaaccagggtcatctttcctatgctctcttccccacagcacttgatgagaagggaatttggcccagtagttgccccacaatctgctctgtaaaaaggcagtggatacataggattgatgactttggggcttattttttaaagcttccgttggtcccatctggcagctatttgtactatggaattgtcatcgattggggaaaaggttttgtttttttttttcaaaatgaaaagagttattattttttcatagtgtacagaggttacgtaattgaaaataatattaataatgaaacttttagaaagtgtaaagaaagtaaaagtaatcttatatcacataatccagatacagtcatcattaagatattggacaacacttttctacacacagtttcatataagtggttttataggatattgttctggagcctctatttcacccaacacgtcaatccatgacaatagatagaactatgtaattattgtaatggctaaataaactttgtcatgtttatctgtgatgagttagccagttgcctgtggaggtttatttaggtggttttcagttgtttcatattatataaaatactacagtgaaagtcctggtatacgttgcttgaacacttgtatgatattttcttcttaggataaatttctagaagtaggtagtcaacagctatgcacaattatgattttaatatattctaagatcttctaagaatccccatttccttgcactattaaaacacccttcaaagtttttaatagctagaggttggaactcaaccctggaataatggcagtgatgagcttgtctcccctttcatgtttgatgtttccttgcatggtaatccaggtatacatagctctgtgctttggaatgttttcagataaactgacaaccaaaccgtttatgagttaaatttaccatttccaaatatagctttaataataggtagtggcaggtttaagagctgggatgtttagttgagaagaaaggaagttgatccttttctcctaaagttcttctatcttgggagcactgggagctgttcagaagatgcttaggcaatcaggcaggagaaagaaataaagggtattcaattaggaaaagaggaagtcaaattgttcctgtttgcagatgacacgattgtatatctaggggcactttttaataggaatttttatttttgtgcttgactgctttgctcagttgcaaattaatatacttttgacttttaattaaataaaaaatcttttactgatgacattttattctagtgtaacatttctttataaatattatgatagcaataagaagagatagtatgcaaataagattgcaatctgttttttaaaacatgcttttattattttttcttttttacatttgttaattattataagtaaaaatatgcttttcttaaaacaaaaatcttattataagtaagaaaaaaacctaaggattttctgtgtttgtgtttttattctatttttactacacaaatgttagatcattaaaacttgtgggtataaatatctgttcttttttgatgtttattatcaaattgaagtcttaatgcttctccaattatgtaaaacattgcaaatcacaaattgttgatataacattaacaattggcgggttgttgttatttcatatacctgataatttctttcagggatggggctctattgttagacattgaacctataattttctcacttttcaagaagaaaccagtatctttctattctgttagctctgttaatgaaagaaggtggagtattttattaaattagcccaatattgatttttagtgatggtttttcaaagtcaagtttctgactcacatctagcttatcagcacttattgagaaaacatgttcctaaattcttaccacgtgccaattacagtgccttagcaactttatctcttatttatttaaccctcacacaagaaaatgcattatttagatcatgtagtagattatgaaccagaagcttagagttctaggcgtaaatggagaaaaatggatagactgaaaagatgtttaggagtggacttgatagaactgagtaattaattggaacttggaggggaaggaatcaagaatgacttctagatttctgacttgagcaaatgattgagattattcacagatatagggaatacaagaggcttggggggaaagctaggaaattcagtttagaaggagaaattagttggtaaaggtgaacccattcgatttggcagtttggaagtcattggccgccattgggagtggccatgttatagtagaaactagactctagcgagctgatgagtaaatgagaggtaaggatgttagtacacttaatatatattactatatatattgtatatatatataaatatatattactatatatagttatatatataaatatatatattactatatatagtatatatataaatatatatatattactatatatatattagtatactatatatatagttatatatatatattactatatatattggcgcagaacattggatttggtaaaagctgttttaataaagggtggtcatgagcctgcatctgtatagaagggaatgatcaagagcttgtagagagggagaggctgaaaaagaaggcaatgaatgggattctgaaggaacaaggcgcccgaggaggcagaatgagagaagaaatcaagagcagaggtggagggtgtaggtttgttccagagcagagatatctccccttctctgagactagcattgggaataggaaagtgggtgtggctgtgtctaactttgggataagcagagagatgaagacagaggtggcatggacttaaatttgaaggaattctcacctaatgaccatggatgtcttaggcctaacagcataggccttgcattttaggcaaagaagttatgttacgatgaatatatttaaaatttgacagttaaaaatagttctttcacattttaaaatatatcttaaaaaattcctacattttatataaaattcatagactgttgtagttatttagtacttcagccacccaaagggaacaatctttaaaaaccctttgtaaaaagttagatgtttaaaattaggcatgtataagcaatcttaatatttatattgattattttctattatcaaatgcttgcagtttcatattttctctcattttatcaaatagaatggaatattgtatctttatttaaacacccttgattcaatcttatgatatttgactgtgagataaatagattgcttgtcactaagccctttgaggaaaaataggtctcaaatagccatgttttagtgtttctataaatggagcttcttttcaatatagaatgagcagtcctttatccttctgtcagcctaaaatttatggagccatcaacaaaaggcactgaacattttaaatactgtgtttgggatgaactcaggcatgatatgagcatcttctcacttttcagaaaaactgcagaaaaaaaatttataaaacattatttaggttccctattaattgctgggattgccgtaacaaagtaccacatactgggtggcttaaaatgagaaatttgttatctcagagttctggagactcgaaggccaggctccttctaagtctctgggtagctgcattatttcagtctctgcctctgtgcatgtctgtgtccaaatttcaccactgtgtgagggcactagtcatattggattaggacccatgctaatgacctcattttaacttgattacctctctaaagactctatttccaaataaggctgcattctgcagcattttggggggttaagatttcagcatatctctggtgagtaggcacaattcaacctataacagattccattaagagcacattttgttttaataccaagttagatgcatacagtcttttaaaaggaacattttggattttccatgttttttctaaaaacaaatccatgctaatcatgaatttaaatgacatctttatagtcataaaatatcactttagtggtggctttcatcttctttagttgtctttccaccagcagtgctgaaagataacatggaaacatgttccgaatagaattttactcccatctgtttccttgtacacattttggtgagactattaatgagctcagacaggaagataaagaggcaaagaggaaaaggtaaatgcaataattcacccccccaaataattttttagttgtttttctcaagctacaataagtaggtgagatgatggatatgttaattagcttgatttaatcatttcacaatgtatgcacataccaagatatcatcttatataacaaatatatacaatttttatttgtcaattatatcttaataaagccagggaaaaaataatttaatttgtcaaccctaaacattctaataaattagttatttccaaatatgtaattaaaatgttataaaggaaaattcccatttcaaaatgaatagcatttgttaatttatttatagaatatattagtttatggataacaaagatctagatctcacaaagtttatgcagactaataaacattttgctaatattaatatttgtcaaagttccttctttagaaatatattattttatttatttatttcattcattcattcattcattcattcattcatttatttatttttttgagacagagtcttgctctgttgcccaggctggagtgcagtggcatggcttggatcactgcaacctcctcctcccgagttcaagtgattttcctgccttagcctcctgagtagctgggattacaggagcccaccgccatgcccagctagtttttgtattttaagtagagacgaggttttaccatgttggccaggctggtcctgaactcctgacctcaaataattcaccaacctcagcctcccaaaatgctgggattacagctgtaagccaccgtgcccaaccagaaatatattttatttatcatacatttattcaacaaatattttaaaatgctgtttaataagctagagaatattctaggtgctgaaaatgtagcagtgaccaaaacagaaaaaaaaataaccatctcattatgaagcttatatcctaatgggggagatggacagtaaagaagatcaagaagctcttctgctgaacgtagactgaagagaagcaagggcagaaggagggagataagttagaggttattgaagccatctggccaaggtactggtgacttggaccaagatagtagcagtagaggtgatgagaggtggttggatactggaagacttttgaaaatgaagccaacaagatttgttgatgaatcagatattgagtgtgagcaaaagagaggagtcaagggtaaccccaacttgtaccaaataaataacttggtacaataatgcttttatactatatagtaaaacaaactttattacatctgaaaattgttgagagctgagttttccaagcagatttaaagctgagctggagggcaattattgcctttggaatatttattcggaattgaattaaataatcgaggaagtggaaaggattatgctatctgtcacaggaaacaaaaaagaatgggaaggaccttcccacctttgccaagcagaagtggaaaatgatcacaacagtgctgttacaaaggcagtgaaagagaagcagattacacatacagtttttaaattactacactttgtttctgaagatattggaaacattcaattagatttgctgaataaaatgacaaaacctgttggacattaattttatttgactactgtcagtggttataatcatgatttacttgatctggtccaaggatactttggcattttgatacatatactgtggagggttctttgccaacctttggggaggtcacttgctccatatctgctggttaacctctcttccttcccacttctctatattactgttgtttaacttgctgttcccacccagaagataatcatcagagcatgcaaaactccagactggtcctgggatgggaatttttctacatatacaatctcttagcttgtgaaataattcctacctgaaacttatataaaccagaagtagtggtttatctggttctacaagttatgggtcgttctgtgcacagaggtttcaagggtgcacagaatgcacatggagagtcaacccttgccttgagacctccctacatgctctgcagaagaaaatgttgtgactatctcaggtcatgactcttcatcctgttcagcaaccctgactgtgctcaatagtgtgtgtgcctcaactgaagtaaatacttaactgtggcatgcgctattcttctaagcattttctggttcagttttattggtatcactaggtacctagcaatcacaaatattaagccataggatatgtgtttagtagtttaaagtaaaatattgtagctttttttgatgataaaatgttttgagagctcttttctcaaaagtaaaaaccatttactagaagactaaaagtgattatggatgatggcaaatgaggtcctagatggtcctggtgtgagacaggtgattttatcattttctttgttaaatactaaattattaatactgaaaatctactttatagctgcatgatattggtcaatacggattctaagattgtagaagatttgtagaaatttgtacctcatacagtgatgatatgctagtaatgtttcaaagtaggtttctattcttccacaaagcagccactatgtaaaacaatatgtcagtttttcaaaaaataagataaaaatagaattaacatgtagttcagcaattccacttctgggtatatatctacaaaaattgaaagcagggtcttcaggagatattaatacactcacgctcatagtagcattaatcacaatagccagaaaatggaaacaatgcagatgcccattgatggatgaatggatgcaaaatatgtggtatatccatacaatggaatacgattcagcctttaaaaaggatggaattctggcacctgctacaacatggatgaaccttgaggacgttataataagtgaaataagccagtcacaaaatgacagatactgtgtgattctacttataagaggtatccagagtagtcaaaatcattcaaaagaaaatagaatggtagaatggtagaggctgaagggcagagggaatggctagttgttgtttaatgggtacagagtttcaatttcacaaaatgaaaatggtggagatcagttgcacaataatgtggaaatatttaacactactgaactgtatgcttaagaagattaacatggcacattttatattatgtgtattttagcacatttaaaaattaaaaagttaaactacattcaaaagggacatgtctcagtccccagtagatgcctgaagccacagacagtactgaacctgatcactatccactagaacacatttctgttcatgtcctctacccaccaatgtaacaccttttccatcttaactcagcacttatcatttactctggccgtaacttttgttgaggtgtgacagccaattttcctttttcacagtttcacaaataaaagatttattcttaccatggatcttagcaatctcaaattttttttttcattttcttattgagaactttcatcttttcacgtaaaggaaacactttacagcatcttgttggcatatccaaattgacagcatcactacacttgcactttgtggtcattattaagtaaaataaggatgacttgaacacaggcactgtgataccgaggcagttgatctgataacctagacaactatgaagtgacaagcaggtgggtcaggttgagtagacagcatgaataccctgggcaaagggatgattcatgtcccaggcagggacagcttaagatttcatcacacggcgggatgtggtggctcacgcctgtaatcccagcactttgggaggctgaggcgggcagatcatgaggtcaggagatcgagaccatcctggctaacacggtgaaaccccgtgtctactaaaaatacaaaaaaaattagctgggtgtggtggtgggcgcctgtagtcccagctacttgggaggctgaggcaggacaatggcatgaacccgggaggcagaggttgcagtgagccgagattgtgccaccgcactacagactgggccacagagcaagactccgtctcaaaaaaaaaaaaaaaatttcatcacactatgcagaacagtgtgcaatttaaaacttatgaattgtttctttctggaattttttgtttaacattttcagactacagttgaccctaggtaattgaaactgcacataaagggggactgttttagtaaaaaaaaaaaaaaaaaaccatacaattaggttcttctgaagatatgcacttctgttttacagaacaaatttacttttggtcacttatgtgagtgggagtggggagacactgatatttaaattgttacactcagaatagtgtttacacactaagaaattagacacgtcagttgtgcctcattttgttgcaagtaaataaaattaattttagatgatttaaccaagaagaaagagctattgaaaggctactagttgtctcaaagtatgagaaggaaaagccaactgggcaagacagacttaactcagcaggcctgcggtgctcagatgctgtgttccaaagacgggcctgtctttaagaatagaccttggctggcttctgggagataatctgagcccttggaatattctgccccagtagtgtggttttctatgcctgagaccttgagccacactatatttatagtgaacatcagtttttgtttgtcctggggccttggcaatactgtaccaccttgatagatctttttatgctaataatgtgatttgggttaactttttttttgctggggttgagggtgtgggagagagctggagctgagtagctgaggtcagtcacatggatattgcttgtctatgtcatagaccccccagtaaaaccctggacactaagacctgggggaacttccctggttgggaacacttcacatgggttgtcacatgtcattgctaggaaatataagtacatcctcatgtgactccactgggaagggagaggtcattcacctctgaaagactgtgcatagtttctcctggacttcactacatgtgtctttttgctttgctgattataatctgtatctttttgctgtcataagctgtaaccatgagttcagcagcacttctgagttctgagtcctagtgaatcatcaagcctgaaagtgttcttgggagcccccaacacactgactaacccagttgtgagaaggacagtcagaatggctcttgggacctcagcagcatgacctgatgacactagtccctaggtcactgccatgggacaatgtaatcccagacatcttctggacccaagcagagaatatgatgggcccagctcaggccactcacatacagtatgaaatgaaaatttaagaagttctcacatttaagtattatatatgaaataaaaaatgttcatgcataaagtaattatgacaaaatagtccttctatagactacatacaatatataaattccaatatttagtaggtatttctatgacttagatattactcaaatttagtgagtgtttcataaggataaaaggagaaagataataaaataggaagagaagaaaaatgaataaaatattgttaaacatctaagtgtgctgagtgctattctgtggactcctacctgctatcttgtttaatattcacagccactacctatgggaacaccatcctctctttaaaagcaaggaatctgaatctcagagacactaagtgactcggattagagcccaggattttatactttgagtcaccttgttagacaggaagcttagtataaaaatgatggtattaacattaatttttcctgaataatacacaaacccataaatgtaattcatatttattatcaatagaaaaagtactgactgatcagctgaagtgcctgctactgtactagaaacactaactttattaacttctaaaagtgaatttaagaaagactaaaaacgtaataatagaagcatcgtatgtactaacatatctaacatatactggcatggacacaagccagctcaagtcacatctttattttccattaagtcaagatccaataaattatctgcatctctaactctcccttttgaccttcagcactatgacccaagtcttatcaaagtcaccatattggtggtataaatatttgtacatgtgacaggagaaatattttagctgaaagattttctattaaaatattgttccaaaaattaaatgtgaggtagtcatcatagtaaaggtccccctaactgattgtttggtatatataaagaataccttatacaaactggatggcaaaacttgtccagtaattactaattttttttattctggtgtaataaagtctctttattggcttcacacaatatttacattcattcattcattcattcagtcagtcagtcagccagcaagccagcaatagatatgaagtgcctgccacatgtttgacaaagtttaggagaggtcgcttacctggatttaagagtcatgtataagcagaaaaaaatttgtaaagaacaaaggactcaggattgagtggtgaatggccatggttaggaagaagagaggagaaagaaagagaaagggctgtgaactaggcagtctggtcacagagttttgggtaggaacagatcagggagagaatggtattggcaatgtcccatgcagaggggccagtaggctgctgagctgttcagctgtcgctgctgatcggaaggccaattccaggagccttgtggagggaacagctggagggaaaaggaaagcacctgcagcatgagtagcaacagaggagggaaagaagagaggcagaagtgaggtgagaggacgtgttcctcaaagtggcagacacctgtgtatttttaaaatcgaaacagatgaagatgtgcattttatcatttttgggtgcaaaatttcttgaaatctttattatttcatgagaattccctgctttccttactttttgcatatttataacaatgcatgaaaaattttatttgcatttgctcactgaatgtatcaaacatttatgaacttgttcctcattgttttgcttgatttaaataatttgggtacaagtggttactttgaatgataaatagactgcatttttaatgaccgtatatggctaataacaataattttgattcttattgcaccaaatagttttctttgtaatggcttcttttattctgatgaattttatttatatgcttagaatataaagtcactattacatttttgctatgtaagtaagaagcagcgtgaatggtggaatttgaaagagaatgatcaaaaatgaaaactctgttatttttgaacatgtatttcacagcatgagaacaaaatgtattcagctattcattttataatgagagaaaaatacattttaacttagaattgtactattcagacattataattcatgcagttgtaagagaaatataaatgctctacatcagttggtagagaaaaaaagttacattccaaccaaacatttggagttaaatctcttacatagaacacattattttttaaagaaagaaagaacattgaaagtcaggaattgagcattaggcctttaacaagattcagtaagaatcagaaagctataaagtttgaattcagatgctaaatggaaaacaaattctgattctgtgataaatcagtgaacacctcccctctattgaccatcaacattggcataatggcttctttactttctcctgagccaagatagaccctaattcaatgtttgatgaattcccatatattgagtattttaataaccttcataaaaaaataaaagatgctccatgaattaaaggtggtctttggcttatttttccagcagcgatgatagatttgcactgatcggtctgtacttttgtgcttatgatcttttgggttcaatgccacactgaaagaaggttcgctagattcaccaggctgtagaacacaacataacagctaactaacccacaggaagattgaacctgcaaccttagctctgctgacagtgctcctctagcaggtcactgagctaatgaggttgctgtggtgagaatgtcctatagaagggctgcaccttgttaagccccagtaatgtgtcttgcacaaagttaagctgaggttggtccatgcagctcttgctctgcttttacgtcctgctataatctctctcttatcttttaggttgatagtatcctcttttccttcccttatcccacaccatcctgcccttgtcaaaaatcactttctagaaagaagctggtacatacattaaggctcaagcattaaatcttctgaggtttttgaatatcgagttttatctccactggattgtttttcttctcacagttatcgaaaggcaattggcaactcaatccaaaataaagaattaaagtatatagaagcctctcctacaaatttcaccaccataagtaacaaaggtgagagagagaaagagagaaacagagagggaagagatattttctgcacttattcctctttgcttttacagcggaaacctccaatggtggtggacgatctttttgaagacatgaaagatggtgttaaactgcttgcccttctggaggtcctgtctgggcagaaactggtaagaatttttttgtgtgatcatacttgtcaaattgtttccatttggaatttggggactatggagttgagagtgctaagatgtgctgcccaggtaaaagaaagttatttgtcgtggttggtagtatactggaaacactgctggcacttctacttctaggtgcaaggaatatatttcccttcttgttcctgcaaacccctagtgcatttaaaatgttatgtttataataacaaccttacaattaagagtaaagaacttcatcagtaacttaacatgattaaccattgtatctatacggtatacaagaagattagttgcaaattaccatcttcctcactttaagtgtttgtcttccatttagaaagaaatgttggtccatatctgtgtatttatatagttgtttattgaaaattaagcaggaaaccagtgtggcatttttcatattcttgttgacatcatccatcatccatcatttgtagcaagaacagcctgttcagagttgtttttatgtgctgtggagccagcagagtgaaaaacaacattaacagtgagctagaaagtacattttctacattgtcaaataataaattatctcttcttgcttatctctttttcatttcagagtagtagagcattaagtagtttgtaaacataaattatttataaataatgtttaccataatttggaaaaaggaattcaggaaataattttcaagatgttggataacacactagacacagagtccaaaattgaaagtccattttttctttatcacttgtatcttggcaataatgacacaatcattattacttggataactgagtttttaaaagaggatttttacctcttcaaaattaatttccattcattttgtacagggagccctcaaatagcttttgtaagagttgtttgttgaaaaacataaactggtaataattttgcatcagtcgtttaagtaattggattcccaggtagcagatgcttctggcaccccatgtctcatctcagctacatcagtggtagacattcccatatactctgacagcttctttcttcaagcactcgtagtatctgtctggctttctgcctcagggcttttcttaaaggcacaagttgcacagagcagctttgaagtgttggggagttagtagtaccaagggaccctcaaccaatggatatgggagtctatgaataaatgctccaccctaaaattacagggtaattctgagacaggtgattctgaggcatattttacacatgtcttatagagttcccatagagtcatcagtgggactgagttccagttgccaatagcagtaaccctcaatagcacatcctttgttagcttttcctccttccccatctcgctctccacacatcctcattcttgccacctgggatcacctccctagtaagctacatgcacccaagtgcttgtctcaagctctgctttggaaggaatcaagctagacatatatgaacaggcaatttggaatgtatataggcatatgcattagctaaagatactagataagcattaggttgtgggagtcattagattgaaatacatactcccttgattacctgatataactggccatttagatatatcctcctgaattaagctattttcttgaaggttaaaggaatctttatgtgaatattcatgtaggtattcaagaagtttatgtgtcattctaagtgtttattgacatatgcaagtcaataaatgtgatacatcatacaaacagaattaaaaacaaaatctatatgggcatctcaataagtgtagaaaaagcatttgataaaatctagcatcttttaatgataaaaagcccaacaaactagtcatagaagggacatacctcaaaataataaaagccatatatgacaaatccacagctaacatcatactgaatggggaaaagttgaaaacattccccttgagaactggaacaagacaaggatgctcacttttgccacttcttttaaacatattactggaagtcctagccagaacaatcaggcaaggaaatgaaataaggggcatccaaattggaaaagagtaagtcaaactatcattgtttgctgatgatgtgattggatacctagaaaaccctaaagactcctctaaaattcttagatttgataaacaaattcaataaagtctcaggttacaaaatcaatgtgcacaagtcagtagcacttttatatagcaacagccaccaagccgagaataatatcagtatcagtaattcaattccttttacaatagctgcaaaaaatatctaggaacatatttaatcaaggagttgaaagatctcgcaaggagaactacaaaacactgctgaaagaaataatagatgacacaaacaaatggaaacacatctcatactcatagattggaagaatcaatgttgtgaaaatgaccatactgcccaaagaaatctatagattcaatgcaattcctatcaaaataccaacataatttttcacagaattagaaaaaacaattctaaaattcacgtggaagcaaaaaagaccccaaataggtaaagcaatcctaagcagaaagaacaatttgaggcatcacattatctgactttgaattatactacaaggctatagttaccaacacagcatgatactggtataaaagtagatacatagaccaatggaacagaatagagaactcagaaataaagccaaatacttacaatcaaatgatctttgacaaagcattcaaaaatgtagattgaagaaatgacatcctatttaataaatggtgctgggaaaactggatagtcacatgtaaaagaatgaaactggacccctatccctcgccttatacaaaaatcaactcaggatggctcaaatacttaaatctaagacctgaaaccccatacaaattctagaaaaaaaaactagaagaaaatctctagacattggcctaggcaaataattttttactaagaccctaagagcaaatgcaactaaaatagaaatagataaatggacctaattaaactaaaaagtttctgcaagcaaaagaaattatcatcagagtaaacagacaacccatagaatgggagaaaatatttgcaaactatgcatctgacaaaggactaatgttcagaatctacaaggaactcaaacaaatcagcaagaaaaaagacaaacaataccatcaaaacgtgggcaaatgacatgaatagatatttctcaaaacaagatacaaataagtaatacacatgaaaaaatgtacaacataactagtcatcagggaaatgcaaattaaaaccacaatgagataccaccttacccctgcaagaatcgccattattaaaaagtcaaaaaacaatagatgttggcatggaagtgttgtaaagggaacgcttatacactgctggtgggaatgtaaattaatacaacctttatggaaaaacggtatgatttcttaaagaactaaaagtagatctaccatttgatacagcaatcccactactgggtgtctacccaaaggaaaagaagtcattatttcaaagacacctcacacggatatttatagcagcacaattcacaattgcaaagatatggacccaacctaagtggccactgaccagtgagtggataaagaaaacgtgatatacatacaaccatggaatactactcagtcataaaaaaagaatgaaataatgtcttttgcagcaatttggatggagctggaggccattattctaagcgaagtaattcaggattgaaaactaaatactatatattctcacttgtaagtgagagctaagctatgggtacacgaaggcatatagaatggtataatggactttggagactcagaaggatgagggtaagagaggggtgagggatcaaaaactaaatgttgagtgacaggtgcactacaatctgagacttcaccactatattattccttcatgtaacgaaaaaccaattgtaccctaaaagttattgaagttaaaaaaaatggaacaggaaattaagttcattctagcagaaaaaggtaaaattgaattcttatctcatggcctatacaaaaattaaatctacatgaattaaggacctactgacagtaacactctaaactcttagaaaacatgggtgaatatgttttagacacagggataggaaaacaattattcaataagacacaaaaatattgacaataaaagattgctatatttaatatattaaaattaagactatcttaaaaattaaaaacctttaaaacaactggcagaagttacaaacttgttgaagatattcacaattcatgttgtaaaaggattaaatcaggaatatataaaatacatcttcaaaacaatatgggtgcaaacaacccaaaggaaaacctgggcaacagatgtgaaaaggcattttgcagaagaaactcacatcaccaatgaacagaggaggagaagtccccattgctgctgatcagggaaatgtaaatggagactgcaatgaaaaagagtacatatacattttacatatattcaattgaaaaaagtatgtttaaggtatctgtcaaaatcaaatgttggagaggatacagattagcaggattatttttgcaatgctgatcagaataaaaagtagtacaaccattttaggagagtttgatattactttacaaatggaagtcacattcccttcgactcagcaattctactctcaggtacatgtccaagagaaactgtgcttgtacaaaaggtgagaagtacaagaataatcatcaacatatcaaaatatcaataacctggaaatagcacattcatatcagaagaagagtatagaaatagcacattatgtagcttttgaaatgaatgaaatacagtgaaaggcaatgatatgatgaatcttagcaatataatgtggaaaagtaggtctcaaatgattaatacagtgatgctcttcatataaaattaaaaactaagcattctttttaagaaagcgtgtgaaagaaatgaatctctataaaatggcaaacactagactggagttagtatgacgggtgccctcaatgtagtcagataggaggatgggattaatggtggtcatattttgggatatggctttcatacttagttgtgggtcctgactttgttttaggttgcaggttctgggtgtgttttacatttttaaaaataattaactaataagctaaataaatgggctgtgcacagaccaatgatgagactgtgtcgtgtctaacagaggtctcagtaaataatttctgctcttagacatacagaagactaaaaggcaaatgcattaacagataatctgagaatgaatgcacttattgagtgaattagtatatcttcagagtgccatggggaacacccctttatgtatttgctaacctttatagaaagtgaacaatgttggttgcttttgaatattcttcaagtatatttttaatccatttaaatagatcttataactaacattttaatatgcagattttgtctcattcccttttttaccccactttttacagccttgtgaacaaggacgccggatgaagcgaatccatgctgtggctaacattggcacggcactcaagttcctcgaaggaagaaaggtaagagagaaacaaaaacaaaatgcccaaggaagaaggtgtgggcatacttatgttttcagtattggctcctatctgtagtcagataggaggatggcatgtaatctatacagcctagacatacaatatcattgtattataaaatactcttagatttatggagaagttgcaaaaaagaaattttatttctacagttcatttcagtgtctagtgttaagagcttacataaccataatacaattatcaaagtaaggacattaaaattgggatgatactattaactaaaacatagacattagtccaagttcatcaatgttccctctattgtctgtgtctgttccaggatccactctagtatcacatcttacatttagttgtgtcttccattctatgacaggtcttcattctttccttgtctttcatgaccttgacacttttgataactgctggtcagttattttgcataatgtctctcaatttcagtttgtatgatattttctcgtgattaggttgagtttagacatttttggaaaaagtcccaagaaagtgatgtcatattcttcccagtgcaccatattagtaaatgtagggtgctgatatgtcttattactggttacattaactttgaatacttggtaatgtggtgtctgccatgctttcctatggtagagtcactgtttttccctttatagttgggaaataacttaggagagataattgagactatgctaagtttctgcttttcctcaaacttttgctcactgattttagtatccattgccttcaataattatttctgtgctacttgcctaatgattttctgttttcctcattccttctatatttattaattggaattgttctgtaagaaaaagatgtcctcccccacaatttacttatttattcaattatttattccagtagggacacatgtatatttattttgttacgtagttaaaattcatcattatactcattgttattattttgtcactcaaattgttctagctttgaccgctaagagctccttcaggcttgcacctgtacctttttaatattggctcataatttttcaagcagatttttatttgctagaactacagatattccaggtttttcttaaattttccctccccagtcctggaatcaaccacttctctaaagaggcttcgttccttttagtgatgagtggcatttagaaaccaagatctaaatgctaagtatttcattgctactggggcatcatttctcctaggccctctcagcaaatagattagaaaatgtatatgtttatttatttattttctttttttaaattattattatactttaagttttagggtacatgtgcacaacgtgcaggtttgttacatatgtatacatgtgccatgttggtgtgctgcacccattagcttgtcatttagcattaggtatatctcctaatgctatccctcccccctccccccaccctacaacagtcccgggtgggtgatgttccccttcctatgtccatgtgctctcattgttcaattgtatatgtttattaactcatatatatacatatatctgtgcttctctctctctcctctctctctctctatctctgtatgtgtgtacatgtatatacacatatacatatgtagcttctcgcacgtgtgggtaaaacattagttcagactaatacctctgattcaagttaaacactgcaagttttactctggccttatgtccttgtttctgctttctctgataatgagaaggcttactctcatctacaatatatttacttattttttcaaccctagtgtgttagtccattctcacatgctataaagaaatacccaagactgagtaatttataaagaaatgaggtttaattggctcatggttctgcaggctgctcaggaagcatagctctggcatcagtttccggagaggcctcaggaagcttacaatcatggcggaaggagaaggggagcagggacgtcacatggccagagcaggagcaagagagcaaggggcgaggtgctgcacacttttaaacaaccacgtcttacgagaactcactcactattgtgtggagggtacccaagagggatggtgctaaactattgataagaactcgccctcctgttcaatcgcttcccaccagggttcactttcaacattggggatcacatttcaatatgaaatttgaatggggacatgtatacaaactatatcacctagtatacacatctagtatgtcactaacccatgcccctgtgagaaacagatttacaaactagagaacaggatttgtgtgtagttctttttgtctttagcattacagtatccagtcaaaaaactatttttgaaatgttcttaggttagttctattcttccccatccccgtcagtgggattatgtcattatctgttatagagataggttcatttgttgttgtttgtgttctattttgtgccccacccccatcctggtcgattttatttgttttaaagagtgggacattgttatggttctaaaataataaacgttttatttaaagaagtcaaactcctttctcatccctactactccattctcattccctgcctctaactgcatttcctacctttagataaccagtctctctagtttctgacatacattttgcattttttccacaaataagatgtgttttcatatatccccgtctttcttacatgaaggatagcataccataaatgcattttgcttttttcacttatcaatatgtcctggaaatcatcccacatcagttcatagtgatttctctactcatttttacagttacacagtgtcccattgcctagatatgccatagtttattcaaccactctcttatgaatgggaattgggttgtttctagtatttttaaaacacaaacaatgatgcagttaataactatgtgcataagtgcttccatataattggaggtgtatctcctaggtaaatttctagaagtgtgcttgctaagtcaaaaggtaaatgcacatgtaattctggtagatattaccatatttccctccaaaagggttgcaccaatcctcttacatttagccttttctaatttgtgggaattgaggaagcctgtgcttagtaataccaaaactagttttataaatggagatccagatactcctagaaaatagacccattcagttatttccttctcagtttatatgcactgaattaattagattacaaatgcataattgatgactttctataagacaggaactctagaaaatacaaatttacagaaaacttagattctagcccttaaataatctacattgttgataagttggtaatgcaatgaatcagtatacatttcagtcaattgtgcaaatttcatgcccaagagagattccaggcattaggatagtgtgcaaaacaattttagcttcttatgcaatatcaggcagtgtttccagatcacactaatctcattcttattgaagggtttctcttctttctgctcacccttcattaatttttcattgaaagctgaatgaagccttgttaaacaggatatttagagtttttcaggaccagatgcagtggctcacacctctaatcccagcactttgggagggaagggtaggtgaatggcttgagccctggagtttgagatcagcctgggcaacatggtgagaccttgtctctaaacaaacaaacaaacaaacaaattagccagatgtggtggcatgcgcctatggtcccagctactcgagaggctgaggtgggaggatctcttgagcctgggaggttgaggctacggtgagctgtgatcacactccagcctgagcgacagagcaagactctttctcttaaaaaaaataaaaataaaaaataaagatagagtttttcaggtcattcattctcccatttcagctgtatgacaacagtgtcctacttcattctgagttatattgattggctggaatacaaaaacaaaattcctcttattaacttggaagccttggcgaaaactttaacaacttcacctatgaaaggcattgtttataaagaagacttgttttcacaatgtccattttcacggaacaacccaaagtaaaaaaaataaagtttaaatatatttgctaagcaccaaaagtagtgtcttgagaatcagaacaaaatgaaagaatttctcttttttccccacaagtctcttaatctttttaaagtcacctcctccccacatctccctgaaacattcttgtcggccacactctcttgcacttctgtatcctacggcctcacaaaatgtttgcctgtgggaagtaatgagttttggagggttctttagtgccctcccacttattatcttagcattgatctttacaagttaaaacttatgtctcaatcatatttttagaaatttgtctttgatctttgtactgactttgtcttccatttggattttttttcttttgataacaggacatttatttaatccttttattcttatttagtttgacttagggaataatgaaggtattcctcattttactggggaaaccctaacagtgtccttagcttttctcttatttgcagggctattgaaaaaacttatgtaagaatctgatgagaaatgtgtaaatgtgactgtggtgaacagattcatcaccatttgccacaagtttctttctccaatgaggtgtcaggcagatcattcagcacagtaatacagggagccaaccactgaccatcatagtgcagacaggggacataaattcagattcctgtgaggtccagaaaggtgatgtaaaggaatgaggtgagttccaggctaactgtggtaacaggagaactgagtggtcctgcgtcctgtctggaagaggggagcaaatagttccaactaaagtaacctcagtgaactgcaagaactgtgatccctggttttctaatttacaaagaagagccagttgtctggacttttattaaaatgtaattaatgtttaaaattcctttaaattgtgtattaaataaggcaggcagttgactacttgcattattgttgagaatgaggtacctgatacctcattgtagaaagcaactagtggaaagcagtaatggatttattcattaagttttcaaatttatgaagaaaagctagtaacatggatgtttactgagagttttttgaaatttatttccaaataattcaaattttttactttttttcttttcttttcttttttttttttgagacagactcttgctttgtcacccaggctggagtgcagaggcacaaactaggctcactgcaacctccacctctcaggttcaagagattctcctgcctcagcctcccgagtagctgggactacaggcatgcgccaccaagcctagctaatttttgtatttttagtagtgacagagtttcaccacattggccaggctggtctcgaactcccgacctcaagctatctgcccgccttggcctcccaaaatgctgggattacaggtgtgagccaccacgcctggtctcaaatatttttttaaacatctgtgagctgtgcattagtccgctttggctgccatagcagagtatcacagactgggtggcttaaactacagaaatttattttgtcagcgttttggaggcaagaagtccaggattaaggtgcctcagggttgttttctggggaagcttctcttcctggcttgtagacagttcccttctctttgcgtccttgcatgacattttctttgtgtgagtgtagagaggaagatcaatctttggcgtctcttcattttttttttttttggtattcattgtttttttttattatttttttaaattatactttaagttctgggatacatgtgcagaacgtgcaggtttgctacataggtatacacatgccatggtggtttgctgcacccaccaacccatcatctacattaggtatttcctaatgctatccctcccctagtcccctaccccgtgacaggcactggtgtgtgatgttcccctccctgtgtccatatgttctcattgttcaactcccacttatgagtgagaacatgcagagcttggttttctgttcttgtgttattttgctgagaatgatggtttccagcttcatccatgtccctgcaaagaacatgaactcatccttttttatggctgcatagtattccatggtgtatttgtgccacattttccttatccagtctatcactgttgggcatttggattggttccaagtctttgctattgtgaatagtgctgcagtaaacatacatgtgcatgtgcccttatagtagaatgatttataatcctttgggtatatacccagtaatggggttgctgggtcaaatggtatttctggttctagatctttgaggaatcaccacactgtcttccacaatggttgaactaatttacactcccaccaacagtgtaaatgcgttcctacttctccacatcctctccagcatcagttgtttcctgactttttaataatcgccattctaactggtgtgacatggtatctcgttgtggtttttatttgcatttctctaatgaccagtgatgatgagctttttttcatgtttgttggcctcataaatgtcttcttttgagaagtgtctgctcatatcctttgcccactttttgatggagttgtttgtttttttcttgtaaatttgtttaagttccttgtagattctggatattagccctctgtcagatggatagattgcaaaaattttctcccattctgtaggttgcctgttcactctgatgatagtttttcttcatcttttttaagaacactaatctcactgggcccagcgtggtggctcactcctgtaataccagcactttgggaggccaaggtggccagattgcttgatgtcaggagttcgagaccagcctggccaacatggcaaaacttcatctctactaaaaatgcaaaaattagccgggtgtggtggcgcatgcctgtaatcccagttgaggcaggagaatcgcttgaacctgggaggtggaggttgcagtgagccaagatcgtgccactgcattccctcctaggcaacagagtgagactaatctaaaaaagaaaaatctgattagattagggccccatgcttatgaactcatttaacttcaattatctctttaaagactcattctccaaatacaatcacattgggagttacatttcaaaatatgaattttggagggacacaaataataattcattccattcaagcctctgtcttataactcagacttctccagattacatgggccaggtacaatggtctagtccaggattctcaagcactaatgtgcatcagaatcacctgaaggttttaagacactttccagaggctcacttccttagtttctggtttaatgggtccaaggtgaagtctcagattctatatctctaacaagtttccaggtgacgtgcttgctgcgactctgggaatcaccctttgagaacatctggctcaacatccttctgctctggttttatctgtcaatatggtcccatcttccttctggcttctggaaattcttcattctctttggatgtgtctctattgcccatcctaccctcctaggctactaagaatgtattgtaagttcaataggattttgcaagagatgggaggttaaataaacagacaaaccaacctgtgctccctaaactcattgtgaaacacattttggggcagataatcatgaaaaacatttttcttcacaagttaggcaaaagatcctttagcttctgtaataaattgaatatgttaacaatgtacaatttcaagtacaattggaactgggtcgaggtaggataatcaaattatattcaatagcactttttaaaaaatgatgcacaaggaaaaggaagaaattttcccctgtgaaattcattaatcttatggatattagcatatattataaattttttgtgtatgtatgctaaaatggatgtggagaaaattctagagaagttgtaaaatgaagctctcaaaatgatcctagagatcatagtagattctttcataaaaagttaaaaaaattgatgttctttattttccataaagatatcttaaacgtcttatactgattgattcaaaggaagtagatatacaagtttgtaatctataccagttctcaatttttattttttgtcattgaacctgatgaatgaacttcaccagtgagacaaaaatcccataggtatatctcaaatcatttacaatgatttttgtgctagcttttactccacctctgtgatgtaaaactagtaaatttaaactttcaagagtaaagtatttgtgaaatgattttgcatctgacacaaatttaaataaaaaaaatgtacaaacatctgagctttttattaataacacacttcatgaaatcttggctgagaattattgagctagaggtctgaagggtactttattattatttgttttcatttgttaggaattattaaaaggatgtttttgatggtaggctatagaaattgaatgagatagacttaaccatgtaagtccattttgttgggacttagcaaacaactttgtagtggatgaaaaacattagcatgaataatttgggtcaattgtacatagattgacgtctctccttaatgctttatatgtcatcacccaaaagtagggaactgaatgctaataggctctgttttgctatttcttgcctttcctttgtttttctttaaaacgtattaccacagtcaggttctaaactgactacctacctctttattccctttgaacaaataatgctgattttgaaagatgatttatgtatatctattatcttctccctttgtttttcatgtcagtccatgcacagaggatcaccggttagtacaaattttagaattcttaactcctgatttttataggtaaaagggaacataagttacctgctatttggtaacaaacttcaaagtaagtgcatcttcttaaacttctcattgcagtttcttttaagctccagtcaacctctaaatataaataataacattttttttctgtttgacatttttgttggtaattgcctgcatgttatattttttcaactttaaacaaaagaagtttctgaaatccattttatagtttttactttgtacacctaacaaatccccctgaaattttcactgaaaccttgtgcttgtttgtttcggtgcctcactctacttactcccatgtactattacataggcatgatcaaatcttattgatgtctactaaaggcctaattgttacataattaaatgagttataatattctagtacattactagtacagtttctcttttttaaacagattaaattagtcaacattaactccaccgatatagctgatggccgaccctcaatagttcttggattgatgtggaccattattctatatttccaggtattgtgctacagttcctctttcagttgatgcaatgtctcagagggagatcatggtggccattttaataatgctctcatttgccatatctttggggttgatccttaacttagcagaaatgtacctttcacacatacgttgtttctttggtaggagaatttcctcttctcccttgcaaagctgttgcatgtggaacctcacaccccgaagaactccagcagaggtgcccaatctgaaaagcgagcacctcaagatggagatgaaatattgttgcagaaggagctcaggaaaattttcttttttctttggaaaggagcacttctaaactccttttagacatgaaggggaggaatgaacttgccattctattcagaataattgttctaaccattaggttttagttgattaattcattcatgtattctacaaatatggattattgtatgtaagatacactaggggtgcaatgggaagtacaaagaggagtaagatatcaatcatgccctttaagagcttgcattttgtcaggaatgtcaagagtgttaacataactcatttgttgctggaaaagtaaaacatctgaggaaataataacaaagataatgcttatatttttgctggctgttaactcacaaacagattgaagagttgaccagcaacctgccccagctccagtctttgtccagcagcgcatcctccgtggacagcatagttagctctgagactcccagcccaccaagtaaacggaaggtgaccaccaagatccaaggaaatgctaagaaggctttattaaagtgggttcagtacacagctggcaagtaagtatcaagagtttgtctaaatttgaaaccgttaaattgagttatgaatgttactaattgcaacttctaatgattgcgaaatgtgaagagacatttgaatgaatggctttgctttagcgcttatttcactcttgccttgaattgagatataaacacaaatcaccactaatactctaggaaaatgctcttaaaaaattaattttttctttattcatgcaattgggcctaattaattaaactgactaatcctaaactttgagtagcatgagggataattctatttaggtcattgtttagagtttctgctcctattaaataatctttatataaataaacttgaagtttaaactcggttatctcttcatgagactattatgttctatttaagaactgtgtgaactaaggtacacattccaaaaacattttttttttatgttctgaaactttctagcaattttagtttttaaattttttccctttggtctcattttttatctagagtgtagatttttttgtcaactctagctttgtgagctgagaatttgcatctagttttcagttttcctctaggcataataaatttacatgtgtatacatttatatgataatagtggatagaaaatgactgctctcagccagacgcagtgactcatgcctataatcccagctcttcggtaggctgaggtgggcatatcacctgaggtcaggagatcgagaccagcctggccaatctggtgaaaccccatctctactaaaagtacaaaaattagctgggcgtggtggcgcgtgcctgtaatcccagctactcgggaggctgaggcaccagaatcgcttgaacctgggaggtggaggttgcagtgagctgagatcaagattgtgccattgcactccagtctgagcgacagagctagactccatctcaaaaaaaaaaaaaaaaaaaagaaaaagaaaaaagaaaaagagtgctctcaaaaagtactttctcatagcaatttcaatggagttttcagttgattatataagtattttgtagtctgatgtgatcaggggtaagtcctttcatgtagagtatgcttttgtttgattttcctaaacaacatgtaaaattactcattttttatcttgttttgcatgcttaaatgtaatctaaatttgattctctacttctggaaaatagttgtaaacaagtacttataaaatattgaggtactaaacatagggagttctatttttaaggtgtttgaagagcaaaaataaaaaaataaaaagagaaacaaaggatgtaattagtgttgctagtttatgttgttttgtttaacttttaaagtgtgttgctggttttctaatttgggctatgttttcatgattcaagttgtagtcaaatatatttctgaaaacaaagctttgtggctctttagaatctgaagtagaaatgaaataaaaaacccttcccacattgctggaacactgtttaattgcatccacagtggcattactaatctctcttacaacttaactgggcagggagaagactggtgactgcacactgatgtgtcacgatgctattgcaattaaactttgtaataatgtcaaggtgatattctgtggtccattgcttcacacgacattaaattaaccaaaaacaaattgattttcttttaataaaacagtagcttgaagtaaactcaaatttaatgctgttggagttatccagcatttaatttagtttcatgcatgctatgttgggtttcaaagatgtgcaagagtctggtgacagctcaaagtcattgctacaacttatatgttggtaacatcagtggaagttttactttccttatctgggccaatgtccagaatcctgggcctgagggttctccacccgtgagcaagcaataaaatccatttcttttgtagctgcataaattgtagaggtttggggcgatgacttttctctgccataaaaattctgtaatgaacacatgattccatgatgctaccaaactgttgataattttttctaaaaactgctttttacactatcccagtatgtacttttcaagcaacttattatctaacatgtgtaaaagactttagaatctgtatccattttgaggtatgagtgatgttattcctaaaatcataatatttcgtgggactctagtttggaagttcatcacactcataagattgaagatggtgggaaatgataaaacatccagtaaacactagactagttatcaggatgtatccactgttttcgtataaagtttaaaaatatttgagaaataaatttaaaaatgatttcagtaacataagatagttaagccctctaattgctaaaactaatttcatccactatcaatacatattatcagaaataaaagctttaagttatagcatatcttacatttgcataactattgtcacatttataagaagaacaattatattttctgacaaaaattagtaaggtaacaaaataaataaatatatgcatatatgtagttatttaaaagcagcttgaagtaaatacatattagaggtcagaaatgcttataaattgggcactgttcatcacttctttaaatgctgtgtctttcttttggttcatatctaaaattctcaaataagaggtttgaactaaaactaaaacttttaaggaatattacctactactttaactgttacaataggaaacagtgtgtgtgtatgtgtgtgtgtgcatacctacatatattttttcaacaaatatagaagaaataaaatgtgctgaaactttttaattatttcattacagtaaatatttagaaaagcatattatgtatttctctttgaaaatgtctaaaacaatacataagttcaagaaaattagaaatagctaattacatggtgaatatttattagctaattatttatttacaccccacttaattttgttaaaaactaatttgaggtggcttaacaagataaaaaacatttttaaatgaggaaatgtggacaaagaaaaataaaatgaagtcagagttggattacaaatgagtagatagaaaggacatactgttcaacctgcatgactgtcagctgtctgctgaaaaaaattatatctgtactaccagagacaagcttgaaaattagagaagattcaagattactttacaatttctggagtctcataaaattgtttttaggatatttattgatgaagccaatgatcaagctcaatgatgcataatatattttatgcaaacagtgtacattggtaaaacatgttttaaagtgaatgataagttgtctacaataaaatttaaggataggctgtgcacaatggctcacacctgtaatcccagcactttggggggccgaggcaggtggatcacttgaggccaggaatttgagaccagcctggccaacatgatgaataatacaaaatgtttgtattcttattgattttttgtattttttgtattcaataatacaaaaattagccaggtattgtggcacatgcctgaaatcccagctacttgggaggctgaggtgcaagaatcccttgagcctggggggtggaggttgcagtgagccgagactgtgccactgcactccagcctgggcaacagaatgagtgagattctgtcttaataataataataatgataataataataataatggacacttacaaacttattatattaatcagcataccattcaggttgtattttttcatgaaaattttgagattctagtaaaaattaattgagcaatatttttgctttagttagagacatctctaaggttaatgagactaactttttaaaaagaagctactagatgactttatccattgaatgttccctagttaagtgatcatatttgcaggccctccacttattcaaggggtgcagccgatgctcaaaatcatctttacaactctgttttcggaactgcctttataattgataagttacatgtaggaaaaaaaatcattcattgtgagcttgcctcgcttctcttttccaagggcaaaatatggctaccaacttgattcagtttcttaataactggctttgagttaatcaaatccgccatcaaagaaaaaagatttaccaccacggctttgccctcaagacaattaccaaaaaggagcttaaaaacaattttattggtggagtaattggaattattgtttgcatttaggtggaatacagggtcctttgtgaacactttgagatataattgcaatatttgcatttgtctattctactgcatttgaaagtattcagccacattatcttagtctgtgataacctgtgtacaacacagtgctgcttcccattagaaacgtgttagctctttctacaaaaaatatacagtggttaattactgtcacttttggcatctttataatttggtttcttaaaattttttcagacatttttctctaaattgatttttctttataaaataaatgtaaacatccttcaatagctcagctggtagagcggaggactgtaggggattgagtataaaataaatgtaaaaatacgctttaacttaactatcttaattgctgaaaaatccaacatagaaatctctaaatatagaaccagaatttcgacatcttatcttgttgccccctaaaaattttgtttcccttaatttttctcaaatacaatgaactgatacagctctctgcatatcgttggtgaaaagcactggattttgcatgaggccttgaagaaagtgcttgtatctattcagaatgtgacatcattttatgtttttataacacaaaggcagactggaatagaagtaaaagattttgggaagagttggagaagcggggttgcctttcattcagttattcatgccattcgaccggaattggtggacttggagacagtgaaaggcagatccaaccgagaaaatttggaggatgctttcactatcgccgaaacagaactggggatcccaagactgctagatcctgaaggtaggctgaatattcattgactgttatataccttaacacggagggtttttatgtcttaaacccagaaatacacatgacttccaagattctattggaggccagaaagctggagaaaagtggcaagtaatggtattttcctgcatcaattttcttctggataaatatctaccaccatggttggggtaaaatatgatcccattgctccaaacagcactttggcattggtatgtcagtcgggtgaactggacttaatatacttaagggtggaatgaaagttttagaagtgtgtgtatgaggggtaggtgacaggataatataattactctatataatctcagaggtctgaaagatgtagattattcatacttagaaatgttgttaaccatgcagtgttttggtgtcaatcagcaaacttcacaaatgtttgactaatatttgtcatttcaattgtttggcacgttttttggtaagggcgtgagtgctaagactttttggaaatggagtgaactctttcaagccttcaaaagacaatttagatgcctttgataaacttttataaactaataagttgttatgttgaaacaaaagtatcaaagtgaagtttccaaatgtcacagataatttcttatttgggctggcaattatggacatttctaccagtgaatgcagaaatgtaaatatacagtgaaagcaaattatttttcccctctcctccctacccttcctggcctctggtaaccaccaatctactctctgttttcatgggatccaccaaaaattatttttaaagatggaatttcagactgaacttccctagctctaaaacaaagaggatagacttgtgtttccaagagtaagttacagagacccagttaggtttcctctgagatgaagggccccatggagattccttgccattttaggattctgtttttgagtcccactctgcccccaccccactttcactaggatatcaaagggctttctgccttctttctgcacaaaaataaatcaagggaaaaacacatattccagccatcgacttcagaggatgtatcagagctgacattattcctagagtgggatgaaaggagaatatgcatgattctttcatatccaccagaccagaagatcttaatattttctttgatgattagaaactgaggttgcctaaatacaaggctatcctagatataagacattcctctaatttcttaatgagaacttccccttcaaaaagttatttagccaacttggatgtataagcttttaggaatacagattaggtagaccaaaagctattataataattattttatgatttacatatatagttaacagcatatactatgttaaatcatgtattaaatattgcttttctttccactttcatatttcctgaaaaaaaagttttactcaacggtttgactcatcacctttgagtcatttaacaaatttcagaatacattatcttcgcttccttttaaatagtgtgagttgcagcactctttaaaccctatattgcaagtctctagaaattatacctctaatcaaaaagaacttttacgaaagattagattagttttatacttcattgtggcaatttggtttgctttctgctctataaattgctctgtaagatataatcatttctattgcctttaaaattgatatttaaaagacttgtttacaacacgttttacttatgcattcttacctccatgtataattactaaatctgtatgaatttatttgcctgatttttaccatttgtattagataaatatctataagcttcaaaatcacagtgattgagggcttctcaggccctcgaagagtttccctcgaagagtgcttgattgctcaaagcactgtaatttggagagaatgctccacaaagaggaggctgcccaggaaattgaatataaggcatctgcctttcttctaaagtgaaatttgtgggggcagagagggggcttgtctatatttggccatatatagtgtgtgtatatatatatatatgtcattcagtgtcacacttgtaagcatttttgtacttcctatttatgccagttctaaaatttacatattatttgtgttctattcactagtatgaatagaactagtatgagatactgtatgaggaatcataccgtatctcacccatttgggagatactgtctcatgagatactgtatgtcttatttaaatgacacatatgctactttcttaaacgctgtttgtttaaatgtgtcatctttctgagtaatataattttcatcatgtaatatccagactaaatttggtttaccctcctccccgtccaaaattctaaatagtacttctgttttccttctgcgtttagcgtttttggtgtgatagctagataccaaacttgtattatcaaaatccaatgaatgctaattagtttattcacatttcttttttgttttttcagacgttgatgtggataaaccagatgagaaatctattatgacctatgtagcccagtttctgaaacattatcctgacatccacaatgcaagcactgatgggcaagaggatgatgtaggtatttgctttcttcaagtatcactggtatatgcaatgacagtgactcagctttttgagtatactgttctcaaaaaattaaatttgaatgcattttaatatgagaccaactgattttaaaaagctatcaccaaatggggtgatgattagaggaaagggtttttctggtttgtatgttggatatattagagaaagcattgctaataacaaatgtaaggtatgtgatgctggtacactaaaactgagaaaagatagcagtgttgggaactccatcttagtgatctgagaattgaagtaattgtatttctgtcatagcatttgcacatctagatctttaatcccctcgctctggttgatctgatcaaatctaattttgacttttggattttattacatctattgacagcaaacatatggaagtaagacacaatttgtaaaagttctaattattcactgtcattagatttttcagcctttaaataatttaaataacattaacatttttcatgctgctcaaattacatatgttaattgtcataaattttttaaatcaagaaaaaaaggaaaaggaaaaaattttctgtatttgaccttctagagagaacctatactagagaaaaattaatatgttgatgttaattcccaacatttgtattatatatggcagatacatacaatattttaataaaaatagaattatggtatccatacaattttataattttcttcttccatgaacattataaagaattctgcaggtcaacttatgtatgtacattaatttattactcaatcttgttttaatttataatttttgttgttataagcaatgcttttatgaacaatcttgtaataaaacattgttccgagattctttccttttttttttttttgtgagatggagtcttgctctttcgcccaggctggagtgcagtagcacaatcttggctcactgcaacctctgccagccgggttcaaacaattctcctgcctcagcctcctaagtagctgtgatttcagttgcacatcaccatgcccagctattgttttctgtttctagtagagattgggtttcacatgttggccaggctagtctcagactcctgacctcaagtgatctgcctgcctctgcctcccaaagtgctgggatcacaggcatgagccaccacgcctggccaagattcttctttagaagtggaattcctaggctaaagggcatacaaaattttaatgcttttaaaaatgtttttcgtgttgccttgtagaaagtttgtcctatttcacactccaaccagaaagtttgtcctatttcacactccaagacaccagactgcctgttttcctgtttttttaaacaacggacatgaccattcttttaatatttttgaagtagtattgtattctatttttaattacatagagaggtggattcactgcggaattttaaattaattagaagttgctcctcctcttcctttctcctttcttcctgaaaaaaataattataaggcaaatgacatcaggaaaaataagaaatggaattttcaagatgtgtgaaaaactgtctgtcttcactgttcaggtctcaactggagttttcagagcaatttgagatgacaatgaagagtaataagaaaaccaaaaaatgtaaaatatgttttctttttttttttttttttgagatggagtctcactctgtcacccaggctggagtgcagtggtgcgatctcggctcactgcaagctccgcctcccaggttcacgccattctcctgcctcagcctcccaagtagctgggactacaggcgcccgccaccacgcccggctaatttttttgtattttttagtggagacggggtttcactgtgttagccaggatggtcttgatctcctaacctcatgatcctctcacctcggcctcccaaagtgctgggattacaggcgtgagccaccacacctggtcaatatgttttctaaatagacttagaaacatatataaagaagaaaaaggctaaggagcataaccaaaagcttacaagtagacatcacgccaatagttagaaatcagtgacttcataaaagaataagcaaaatagaggtaactactgtttcctaggtctctaaatgaaattaatttggcatttgatagaaatatgttagcttcttaaaaacaataagttcagggaacctcttttgttccttgccaggattggggcacaaacattggccaccagcgtgacttaactatagttattactagtaaagtaattgtttctaaaaagcaccacaaatggctaaagcaaagactccatgtgcaaatgctggcatggattgatgcaaatattttggagtcatctggggcttgctgggttttgataatattgctgtgtgaataagaaactctataagaaaacacattagacttacctcatatagcacagagaaaatccatccaaacttccatctggtttttatacgtgaagtccttatattacccagatggatttatatctaatttggtgtctgaggttttactgttttagagtctctgacattaatcatctctccagattagtaaactgagtggctggaagcatctaaaaaaacaaaaggagatgctttagttaatgctcatgagcaggagtttaatgcaaaaatccttagagattcgaaacacacaatctattgatataggctttttaatatactttactaaagaagctttattattttcagaggttactttaatcatccagaaaataaattctggtcgttaaaaaaattccctctatccctttcctaaaaagaggatgcatatgatttattcaggcttattatctcaaaaattaattttgaggaaaatgtattggaagcttcgcccttttttagtggcatttgtcatgtagtacataaacatctaaaactgaatattttgaataatgtatttttttgttatgacatagggcttatatttaacagttaatggtaacctaattctgtctagtgaacctttaatattttgtaaactatgcgtattagttttgagccctcacctcaaagtactcagtatttgtcactcagctcttactctcttaattcatttttttaaaaattcttggcatgaacatatctaccaggctttcatttttgtgtgtatttgatttatatatcccctttgtgattttatttgaattaagtattttatcgataccattttaaatatgattttcttactgaaaatcgacatcaccatgggtttttttaatctcatccaataaaactgatgaacttttccccttaagatatttcttgaataattagcactcagtcataaataaataaaataggtctattggcttatctcattcacgttctaaactttcatttattttttcacccatctgttcttccattgcaacaaacattcctgactgccctaagaagcacaacacattcttaattcttatgaggacaaagaaacatgtgtgctgtgtatatttatagggaaagtaatatgagtccatatacctcttctttacatagtttaccttctaaaatatttaatgttatttcgagatatgtttacaaaatatatagctacatatgactatttcaagttaaaaatgtgatattctaggaaatgatgttgccttattggagttgaatatttttgtagtttcaaaagctatgaaaatgtcttaaagtaaatatacccttgaaatgattgcctatttctctaaaggcggatgcctttccattgattttattcttgttttctaaataatttttgaccctgatttatattatatttctatatattatcttttcatattgttaggaaatacttccaggtttcccatcttttgcaaattctgtacaaaattttaaggtaagatttaagtaatcttgcattgatgacctctttcaaacatcctgcattctgtagcattttagtcattcccttgcatgtttttgtctttatgtatacatttctcttaatactttaatcacatcatttgcgtttcctttctaacagaacaaataacatacatatgtgttaccaaatgttagtgatagtctaagctactcccatggacttgcccattaatctttcattataaaatggtatctatcaattaatttcttctttataatacttaataacactaataaaaaggacttacagtaactacgtatggtgtctttaaatgtgacacagaaaataaaaacaaaataaaggtttagttttgtatcttaaaatgttagcagagaatcaatgaacaaggtaagtattcgatcagcttgtcagtctgagtttcctcactctcttctgctcagtattcggtctcatggtttagtaaaattcatgacatgtcatgggtgctcaaaagatattagcagaatgaatggttatgaattcctgtccatatccaagttattgaatgcatgtcccatatttcagcttttccgtttttctttatgttccatctaggccacaggttaaggatatttgtatttatatcaacattggaatagaaaaatcagaagcaactaatttcatatcagatagtaaattttttaaatatcatgctccataaagtatgaggttatgtatatgtgaacatggtacacaaatgtaaatgtgacttatgtgtctgtgtttgtgtgtgtgtgtgtatgagtgaatgagagagaaagaaaaacaataaagtgaaagaaaaagtagagagaatgctggcagtatagctgcttggaatttagatataagcaataggttgccacgtcttctgaatgtgtgtgaaagttatcagttgaagaaaagccctagactaatgggctataaatattgttttgtacttcatttttctcttagaaaggagaatgttgagtatataaatagcgacatccttctcaccttattgcaatctgctagacactttccaaccattagaaagtcatttactaaataggctctaataaagttattttaagaacataacccttttctctcagatgactttgtataacaaatagctcctcttcagggcagtcaagtgctttttaaatccagaagttggtgagcagcctgtcctcaggctcacaatgaagtcttgtgctcactgttagatgggtcacttctggtggccacactgacctctggtaccttgggtacacatcaagaacaagttttctctctgagctcataagaatgtggtatcaatgcttttctgggcatgagaatcaactgataataaaacatgtaccttaattatattcacctgttcattcagaaaagacatcctgggaagaattgaagctttgtagtcttgggctccagttccatttctttctacttttaactgagtttctaacttattgcttattctgcaatcatatattgagtgattctgagtgccagacactgtgttagatgatggagattaaaaagatacataaggagtgtcaaacgtgtccatgtgaagagcccaccaaacaggctttgtacgagcaataaagctttttaatcacccaagtgcaggcagactgagtttgaaaaaggagtcagcaaagggagacagaggtggggcagttttataggatttgggtgggtagtggaaaattacagtcaaaggggttttttctcttgcagacaggggcaggtgttacaaggtgctcggtggggagcttccgagattcattgtccaggagaaagaatttcacaaggtcacttgaccagttagtgtggggcaggaacaaaccacaatggtggaatgtcatcggttaaggcaggaaccagccattttcacttcttttctggttcttcagttgcctcagccatctgaatgtatacgtgcagacttggactcagagacctgacattcctgtcttcttatattaataagaaaaacaaaacaaaatagtggtgaagtgttggggcattgaaaatttgtgggggatgtttctcagagctgcttcgagcaggattgggctgatgtgggaacctagagtgggagagattaaactgaagaaagattttggggtaaggggtgatatcgtggggttgttagaaggagcatttgtcatatagaatgattggtgatggcctggatgtggttttgtgtgaattgagaaactaaacagaagacacaaggtctgaataagagaaggagaaaaagaggtaataaaggactaagaattgggaggaaccaggacatccagttagagagtgcccaaggcggttcagcgtaattatttgcttggttggcaagtttttggactctatccttgagtttttttatgttgtcatacaccaggccagattgatttgggtaaaaacaacactcttcatttaaaaatatacagagttctcctttttcagcagtaagtcgaggcctattcctgtcttctatattaataagaaaaataaaacaaaatagtggtgaagtgttggtgtcatgaggggaagaggaagctgttcagtcctatttgcaaattgaattttgggagtaaggaaaactagtgtgcacgtgcctgtcctattagcaggtagacacatgtaggtagaggagtcacagaagaagagaccttgtgcaacactggaaatgcaaagtgaaaaaatgagaaagagcactaaaagaggtgtcttgtacccagactcctagtattatatatgaagtttctgtgccacaaaagaaatagcactcgaatataaaattttctttttaattctcagcaaggcaagttacttctatagaaggttgcacccttacagatggagcaatggtgagcacacacttggacaagggacgggaaggggttcttatccctgatgcacgtggcccctgctgctgcgtccttcccctattggctagggttagaccgcacaggctaaactaatttcaattggctaatttaaagagagtgacagggtgagtggtttggcaggaaaaatggttatgacagcaggtcattggaatgagtcagggtggaacaggtaatcagaatgagtcagggtggagcaggtaatcggaatgagtcagggtggagcaggtgattgaaatgagtcagggtggagcaggtaattgaaaaagtttgctttacgaggaagttaagtttaaaagtagaaggcaaagaattgaacctactgacatattgattctttgaaaagaaatttagaactcatatctaacactagggatccagctagggcagcagccattagaagttgtaatggggattgatgggacaactgggtagagcgggaggctaaattgaggaattatgtcaacagaagggaggagatgaccgcggtggccttctcagaccctgagggaaaggcctctacccatccagtgaaagtgtctgcacagaccaagaggtattttagtttcctgactcggggcatgtgggtaaagtcaatctgccaatcctgggcaggggcgaactccctgaggagtgggagaatagcaaatggaacactgagaagtgatttccttgaggatagatttccatgatggaaaggaaatgagaggttctaagaggagggctagtggcttgtaacctacatggaagaggttatgaaaaacgatagaatggaatgagctgtaaggctggaaggaggaattttccttggtcaaagaactatttgccttgagtagggagggattgataggtggaaacttcagtgggagagtgagtaggagtgactgatgagaaggagaaaaactggccatgagggacataagtaggaatactggctgcttctttagctgtcttatcagcataattgttgccttgagcaatggggtctgaggctttttgatggcctttgcagtgaaggactccagcttcctttggaagtaaagcagccttgagaagagtttttattaaagagtcattaacgatggaggacccttgcatggtgaggaaaactctttcagcccatgtaacagcatggtggtgcaggatatggaaggcatatttagggtcagtataaatattgacgtgtagtccctttgcaagagtgagggcctgagttaaggcaatgagtttggcttgctgagaggtagtggaggagggcggagcagtagcctgaatgatagatgtggaagatactatagcatagcctgcctttgctggtgagtggcaattaggcctggtggaactgccatcaataaaccaagtgtgatcagggtgaggaacaggaaagaaggaaatatggggaaatggagtgaatgccaggtggatcagagagatacaatcatgggggtcaggtgtggtagcaggaataatgtgggaggccagattgaagtccaggccaggaacaatggtaattgtgggagattcaacaaatagtgagtacagttgaaggagctagggagcagaaagtatacgcatcaagtgtgaggaggaaaatggattttgaaagttatgggaactgtagagtaaatggagcatagcttgtgattttgatggcctctaaaagtattaaagcggtggctgtcactgcatacagacatgaaggccagctcagaactgtgcggtcaggttgttcggatagaaaggctacagagtgcagtcccggctcttgtgtaagaattctgactgcacagtcctgtactttggctgcgtgtaatgaaaagggttgggatgagttagggagagctagtgtgtgagcagcttttaggacagtttttaaggaacggaaagacgagtggggaaaggatttaggatctatggggtcagctaggtttccttttgtatgatggtttagtcaggatggcaaaaacagatatccaaaggcgaaagtacctaactatgcctaggaaggaaaggagttgttgctttgtagaaggggttggggtttgggagattagccggacacgatcaacagggagagcatatgtgcttttatgaagagttatgctgagataggtaatggatgaggaagaaatttggcctttgacgggggagttgcattatccttttgagaatagatgttggaggagcaggaggatgtcctgttgggaagatctgtaggaggggctataaagtagaaggttgtcaaaatattgaatacggtgagaagcagatggacagaaagaaagtaaagtatgagaaagggcttgactgaagtaatgggcgctgtccctgaagccttgcagcagtacagcccaggtaagttgctgagactgatgggtatcagggtcagtccaaatgaaagcgaagagaggctgggatgaagggtgtaaaggaatagcaaagaaagcatctttgaaatccagaacagaataaggggttgtggagggaggtattgaggataggagagtatatgggtttggcaccacggggtggataggcaagacaatttttttgataaggtgaagatcctggacaggctttagtcctctcaaagcctgttgtgggatgggatactggtgttgagcagggtaaggatgattagattttaatgggatagtaatgggcatgtggtcaattgctagggagggagtagagttgtctcatacttgtgggttcaggtgcaggggatacaagaggaagacatgaaggaggttttgaacaggggaaagggtagcaatgagatgtggctgtagcccaggaatagtcagagaagcagataattcacttaaaatgtcttgatctaataagggaactgggcagatggggataactaaaaaagaggcataaaagactgttttccaagttgacaccagagtgggggagttttaaagggcccagcagcctggccatcaatatccacaacagttatgggggcaaggtaaacaggcccttgaaaagaaggtaatgtggagtgggtagcctccgtattgattaagaagggtatggacttacactccactctaagagttacctaaagcatctgtgatggtccaggaggcttccgaggtgattgggctgtgtcagtcttcagccgctaagctgagaagatctgggaaggagtcagtcagagagccttgggccagagttccaggggctctgggagtggcttccaggcaagttggacagtcctatttccagtgggttcctgcacaagtgggacatggcttaggaggaatcccaggctgtggtcattccttggcccagtggccagatttccagcacttgaagcaagatcctgggggagaaggtcctggaggaatgcctggccactgtggtttaggtattttgaagttcttgtgtgctggagatgtggctggggtttctctcacagtggaggcaagtaattgcaactcagaaataagttgccgcttggctgactcttctctattattgtacaccttgaaggcgagattgattaagtcttgttgtggggtttgagggccagaatctaatttttggagctttttctaatgttgggagtgggttgagtagtaaaatgcatattgagaataggacggccttctggcccctctgggtctagggcggcaaagcatctaagggttgttgccaaacaggccatgaactgggctgggcttttatacttgacgaaaaagagcctgaacactaactgatttgagagaggtcagataaagaaaaaggagggttaaccttgactctgccttgagctgcagccacctctgtaagaggaaatcgttgggcaggttggggagggctagtcgtggaacaaaactataagccagacagggtgggaggagggggaggtgatagaaggattatagggctggggagtggaggctgaggaagaattaggacctggctcagcctggtgaggagcagcctggtgaggaggggagaggtcagatgggtccatagaaaaggaggattcaaaggactcagagcttggggtggagactgaaggaacagacaggagagaaagaagatttgtgatgagtcgcactgggagcagagactagggagggactgatgtgtaaaagaatgcctggatgtcaggcatctcagaccatttgcacatttttcaagaaaaatcatccaggtcttgtaagatggagaaatcaaaagtgctgttttctggccatttagaaccattgttgagtttgtattggggccaagcagtgttgcagaagaaaataaggcagtaaggttttaggtcaggcgtgagatgaagaggttttaagttcttgagaacacaggctaagggagaagaagggggaatggagggtggaagcttgcccatagtgaaggaggtaagtttaaagagaaaggtagagacacagagaagggggtggtgagcagccctgggctgtaatgtgggtgagcagccaaagcaggcgtctccacaattgatttgccaccaagggaatgtgggtgaatgaccaaggcaggcgtccccacagtgatcagacactagtggaatgtgggtgaataatcaggcaggcatccccacagtgatcagacactagtggaatgtgggtgaataatcaggcaggcatccccacagtgatcagacactagtggaatgtgggtgaataatcaggcaggcatccccacagtgatcagacaccagtggaatgtgggtgaatgatcagggcaggcatccacacggtgattaaacaccaagggaagactgtcttcccaagtccgtgacccacgctggagttttgtgtccacagataaaatgtgtctcctttgtctctattagagaggaaaaagaactggaattggaaggacagggagattgaaaggtagcgagagaagctggagaagagagtgaaaagaccgcttgcccgatttgaaattggtaagatgttccttgggctggcctgaggacccaaggtcataggtggatcttctcatggagtgagggtgaggacaggggactggtctcctgaaggaatccccctgtcccagatcttcagcaccaaatgtcacgtgtgtccgtgtgaagagcccaacaaacaggctttgtgtgagcaataaagctttttaatcacccaagtgcaggcagactgagtccgaaaaaggtagataggggtggggcagttttataggatttgggagggtagtggaaaattacagtcaaagggggtttttctcttgcagacagaggcaggggttacaaggtgctgaatggggagcttccgagattcattgtccagagaaagaatttcacaagatcaattgatcagttaggatggggcaggaacaaatcacaatggtggaatgtcatcggttaaggcaggaaccagccattttcacttattttgtggttcttcagttgcctcaggccatctggatatatacgtgcagacttgggctcagaggcctgacaaggattttgtgtagttgttcctagatattcacaagtgattggttccaggacccccaagatagcaaaatttatgatgctcaggttcctgatataaaatagtgtagtatttgcatataacctacacatatcctcccatatactttaatctgtagattatgtataatacctaacacaaagtaaatgctatttaaatagctgttatactgtgttgtattttgtttgtattatctttattgctgtattgttatttttattgtttattttctgaatattttcaatctgctattgattgaatctaagaaaacagagggctgactttatataatgcatttgggtgaatattagcgctgaggttgtcacaggatcatagagaagtgttctcaatatatgattccttcaccagcagcatcagattcacctgggaacttagacatacggatttttggctctaccccacatccactcagccagaaactctgggggtggtgcccagcaatttgtgtttttataagcccctcagatgatttctagtgtgtactaagtgagagaaccactggcataggaaacagatgccctcactcagacttctgggttagaaaatcttcctagagtaggttgtgcctgagccgagttctgaaaaaggcattatccaagggaaaatgtggtaagtgtttaggcagaagacaactgcttttgcaagacaagaaagtgagagaaggcatggatcatgagaatgtgacaacctctgtactggacatgctacatagattacctctaattctcagcaaaacaattgaaagggtccgtgatgatttaacacaccctttagtacatcctgtagtatgacagtagagaggttaacgaaaaaaaaaaaaaaaaaagacacaccaagctcacagagctaatgcatggcaaagccagaatttgaaacccagtttagcctgcctccataaatggcattctttccattcggaaacatcacctgccaagggggacagtcattttacctgtgtcacagcactgtcagcagcaagtgagatgctggagttgcattttgtaaatgccgaaaaatcatgtacggtatgattatgaatacttggcattcttatgagacactacatcttgatgaaaagttaggatattttcactaaatcagtgctattatagaatggcccttgtcattatttgtgaaaataagtatgaaaatcccaattttatttttcatttttgagatgagtggtgacctggatacatttattcaccaaataacttgataaatctctaataggtattatgttcccagggtctaggaatactgtgttgaacaagataaatgtgttttctgtccacatggagattgtaatacctaatatcagtttaaatagtaatatagacaagtcacccaatggtattctgggtgtaactcctcaaattcagtcaaaatgaatcccatctagaactgtcttctgggttaccaatggctttgggtaggaagcaacccacaggactgtgtttctactccagctattactcttattatttgtgtacttaggaaattccctcctggtcacattttctttattaaattagcgttacttggcaaaaaaaaaatggagttggttaatttcgttattcaataagataactaagatacttttctagagttaacttttgcttcttactgtcctaaaggtgggggtaaggagaaaggaaatttttcagagacagttgggacttactaaatattaagtctcttctagaatcagtcaagtattaatcagcaattaaataaatgcacagatactaataaaattgtaatgtctcctcatttccagagagaagacagagtaatttttaaggaaatgaaagtttggatagaacaatttgagagagatttgacaagagcacagatggtggaatcaaatttacaggataaatatcaggtattgtatggagaagatttttgaatttttcaaaagctatttttgactaatatttatatatgtcatttgatctccatttaatgcttcaaattacattaatgagaaaagtctttaaagacataacattcattaccctaagtttgcatataatttaataattgtatttctaacttatgtagatagtcttaagttgcattgtgtccacactatatatggagcactgaggcttcatcacttttccataactcagtcttatagatgacttggaaaacaaatgcagagtcattgtgtttatagaactcatgatttttttttttttttgagacggagtctcactctctctcccaggctagagtgcaatggcgtgatcttggatcactgcaagctctgcctcctgggttcacaccattctcctgcctcagcctcctgagtagctgggactacaggcacccaccaccacacctggctaattttttgtatttttagtagagatggggtttcaccatgttagccaggatggtctcaatctcctgacctcgggatccacctgcctcggcctcccaaagtgctgggattacaggcgtgagccaccatgcccggccagaactcatgatcttatagatctcacctaacccaaaaatctaccaagaacaaagagttgagtcaaattgaaaattagtataaaataaactgaatttaacaaaggattgcaacatgagtattggagggtccattaaagggatcagtttcgactgcgacctgcctagtccaacaccattgcattcaagttgagctcagagttaatgtttttctccagtctgactacagtgtcattaattggacttctgcttctgattttcacttccaagacacaaaacacagtttattcccatttacaaagtgtgatttcaatagcaaagacacagaatcaacccaaatgcccatcaatgtagactggagaaataaaatctggtacatatacaccatggaatactaggctgccatataaaggaacaagatcatgccctttgcagggacatggatggaactggaagtcattatcctcagcaaactaatgcaggaacagaaaaccaaaccctgcgtgttctcacttataagtgggagctgaacaatgagaacacatggacacatggaggaacaacacacactggggcctgtgggggagtgggagaaggagagcatcaggaagaatagctaatggatgctgggcttagtacctagatgatgggttgatctgtgcagcaaaccaccatggcacatgattacctatgtaacaaatcttcctgtacatgtaccctagaacttaaaataaaagttggagaaaaaataaaaattaataaaaattgtgatttatttgatgcagcattatcatttttcccaatgtaaaacatcagtcccttttagtggcaaaattaaatatagtatattctgaattatattctgtaatatattctactcgacatcatatttcagtcatttctgctacagaaaaaggtcaaatgaagtgagaacttcaacatggtagacaaaagatttatctatggcattagtgattttatataattgtatctttaaaatatgcctgaatttaggtggatgatagcatcaatattatatttgtcaaacttagcaaagcaataaatatgtggttaatatgcatgtactcttttgctttgaaattcagtgtaagcttttttccccaaaataaaattttctgggctgagatccattaaaaaatgattaagccagtaaatggagaaaagaattgcaagaacagagtgaatatacttatttagtccactgatgaggtttaggtttggcaccaattatcaaaaaataaattccaagttataaagctatctgttatacagatgctagttcatgagggaaacaaaggcttaggaaaacagaaaacagaaatcctcctttcagcccgaaggtgatcactagtctcataaaaatgggtttagagtctctctgaaatctgaatttagggaaaatttcatttcatctttacattctgtaatcagcattttaaatctctttcaatctgtagcaaatgctgcattttccagttttttcactcagaatcctgtggaataaaatttaaaagttgatttgatgttttgtttttttttaaatttatttttttgttgttttttttaatattttttttagtcagagtgtcactctgtcgccaagctggagtgtagtggcatgatcgtgatctcagctcactgcaacctccgcctcccaggctcaagcgattctcctgcctcagcctcctgagtagctgggactacaggcatgcgccactacgctcagctaatttttgtatttttaatggcgacgggctttcaccatgttggccaggatgatctcaatctcttgacctcatgatccgcccgcctcgatctccaaaagtgctggggttacaggtgtgagccaccgtgcccagcctatgttttggtatttttaaaattccattcagttagagaaaatgaaagaaaaccttgtagataaaattctagttcactatctccccccagtgttcttcacgtgaatttacatgtttgtttataattttgaaattcttttagttgtgttatctgctaacttttgtggggccattctcctgtaacataattgcacattttaattatcttttcattttatgtttagatttggagtcatattttaggatgggttaatttagttaatgtaaaatataaaactttaaaaattgttttaatgttagcattaagcttatagttaagtctacatataatacattgatgtcaactgtactgtgatatacttaatattttaataccatgaaattaaagcaaaggattatcatgtaaacatggtcccctaaagtaaacctctttatgcaggcttacttaaacacaaatctagacagctttaattctgcattattttgatatatgcaatttctatttgtaaattgtttggtacttgaagtaaagcaactatcttgattattagctaagatttatactcctgtttactatgatttcctgacaaacatatactggtacacaaattactttactagaaatgagaaatcctaggctttagtcctacctctactacttgtccttgataagtcatttctgggcttcagaataataatgcatgtgtagggtgatggagagaaccagagaggataatatgaagaaagcacttagcacagggtcaagctatgtcagggcttgatgaatgacagctgctattagtatcataactaccgttattattatcaacaacatatattgagtgttatccaaatagaaaagattgttatttaggaaatgtgctttcctttgcttttgctttttttgactcattgccatactgttgctgtttttcctcttttagtcatttaagcacttcagagttcaatatgaaatgaagaggaaacagattgaacatttaatacaaccattacacagagacggtaaattgtcacttgaccaagcattggtaaaacaatcttgggatagagtgacctccagggtaagttctcccacaattagttatactgagcttaataaatttagaaaagaatatttttcatcatctatttctacacagtggtatggcaacaggttctactgcctctgtctgaggctagaaagacttaactatgggagaatctttgcctccttgtctagttttcctgtaagttaatggaagtctttggtttaacagctattttcttgccttggcttccctctatgtgatatcagcaattaactagatgatagattaaagtcctgagaccatctggatcacttcacactttacacaacttccttctgggtggtttagaagaggtgactctctggtcttgtagcagattctccagagtagagccacagcaacttcttgtattctaaaatcatgtttcatcaacagttaatgaccttcctgtgttgacatacagttttgcattctttaattcaagcatctttttttatctgatcatgaatctgaaggaaaattgctcagtatctttcatattcatattcttcatgcttaaaggccaagatttcaaacccctggaacacttctatcactaataagaatatttgtcttgaacttaccatatattctttactttattttattttgtttttgagatagtgtcttgctctgtcacccaggctaaagtgcagtggcacaatcacagctcactgcagcttcaacctccttggctcaagcaatcatcctacctcagcctcccaagtagctgggaccacaggcatgtaccaccatacttggctaattttttttttttttttttttttttgtagagatgagatctcactatattgcccagggtggttttaaactcctgggctcaagcatctcatccatcttggcttcccaaatttctgggattactggagtgagccactgcacccagcctaattttttttttgatagtctcattttttctagtgactccattaaagaataggctagttcctaagcacctcaactcatcccacctggctttccagtaagctaggaaatgtgtctgagaattgggtaaaatggaagagatggagagaagggtagacaatcataggattatagaaagaatcctttaaacccatctttgtccagagctgcttagataatcctcatttttctgaacttgttctgatcacgtgggaggttttaatgggattctcattccgacgaccaagatacacatgtgccaggtgtataactgctgcatcctccaagcatgtcaccaaacctgatcccttccctttcagcaaaagccacactgaaaatcagtgggtgcttcatgctactcctgtaagaggaaaattgcttacacttctgataatattcttccatgtttaagatgtattttcagtttcttcaaaatttgcttttaactgtaattttctccccatccctaaagtgtcaaactcagaacacagacatttgcttatttgatatttattaacttagcctgaaatcattaacttaaagctttatgtatgctttactattatttgggtgcaattttataaattgccatctgtattaaagatattttacttttctgctttttaaattttagctctttgactggcatatacagcttgataaatctcttcctgcacctctgggcaccataggtgcctggctgtacagagcggaggtggccctgagagaggaaataaccgttcaacaggtccacgaggaaacagcaaacacgatacaacggaaacttgagcaacataaggtaaaaattctggttggaaaaccttgcagcataacagccctactgtggtctggagaggtagcctagttacaacctgctctggcggggacgccccaaatattaattctacatgatcggagacgtcacaccttcttagagttctctaatttgattgtttctttcttacactggttaatgacggttccagtgggttgacttcctgagatattttccatacctgtgtggtatttttttcatctgcagctatctttgttatttctgttgttatatattatttttcaaaagataagcatagatggtatgcatttacataataatgtggccggccattggctccagacctcatttctgcctccattctcaaaggaaggcaggcagaagttcttatgtcttggtgctgtggggtgggggtagaaggaatggaggctgtaggaagtggtggggttaggctttgatggtctcttagtcatttgggatgttttaaacttagtatatgatcagttgtatatggtataatttccaatatatttcctctttgtgttttgtgatattacaggcctaactaaaaatgccgtttttcattaacatcacattaatgcaatcttgcattttatgcaattgaatttgtatacttcatttgctgtaatgtggtggggtattcctgcatatgtgaaaaatagagatttctactcctgactacacatgggcaatgtatagcccatgtatattttctgccaaattattgatatttttgaaaaattaccccaaggaaatacactgtcctgtattctagacaagatcataaagcaaatttacaacagattttattgccttttattattttatgcctctctggggctttacttttggagctagatatagagagacacagagatgtgatgccattgccgatcttggccatttcaacttgacagactcaacctcagacaagctcatcaaaccagatggccacggcaagatttgatgatctgcagaggccatcactcagggtcctgcctccatttcctcttggccttttctgatactcagtgcctttagacacttttaaagttgctgatgatctcttagctcctctcctcccccaatcaccaacgcagacaaacacacacactgaactctctgtcatttggcttctcagatgcaagcatgactttggggtcttcttcatctgtgcagatactcacaaataaaagcggggcctgcttatctgtgccttagtgccctaaagtgggggcagctatgccgtaagggacccagagttcaggcctcatacgagatcaagtcacaagaattttcctgggattgaatcagtttcctgggccatgtcaattttgaatcaccccagtatattaaaaatagagaaaagtgtgaaaatagtattacacaaacaataacatctttagcaaattagcaactaagcatatataacacacaataattttttcatggaaaacttaattgaaactatttttttaccttaactggcatttgtttatttatttatttttaaattgcagattcagggggtacatgtgcatgtttcttacatgagtatattacataatggtggggattaggattctagtgtacctgttacctacatatgaaactattttaattgatgtaaatatttgatactaaagaagtcaacttagaattttaaatgaaatgtagaatgtatatttattgagaattaaatacgttaattcagcaaataggcatggtagcaaatattcctactatgtgcaggttttcagctccagggcaacaggtgaggggcacagacgaggtccaggcgtttgtggtgcctccaatctagaggtctgagaagcatctacacaattgttctttgtataatacctttaactttgacttaaatgtcccaccacagagaaaatgccagacaatgtaactgctatttactagttaattataacagtttgtagaaatattaattcaaggcacactatagacagtagtatctcctacgggggagtgagtcctaagttggccaatgcacatgctatctgtgtgtttcaatggctatatgatttcaggcccttcatgagcccttctagctccctcgagagacagtgagagagagacaccctgtgccaacccccaagaatacagctagaacaatctctctgccaaagtctagtgaacaaagcatagaaaccagaaatgaagtggatcagggagagagagaggggcaggagttggagaaaatggttatctgaggcaaacaaacaaacaaaaacccagaaaggactagactgaagagaaaactaaggaatgtaataaagagataaaggtaaaaagcagcgacaggggctcaggccaggttcaaggtgaatattagaatgatcttttcattgaggtaggaacttctactaggcctgggcatgggtacttaaagtagctcataaaacaattaaattgtcaattttaaaatcaattctcatttattgaaaaatatatattaggagcctataataagctaagctttgagggtgaaaagcttgaattattattattattgaaatggaggctcgctttgtcactctcagactggaatgcaatggtgcgatcttggctcattgcaacctcttcttcccaggttcaagcgattctcctgcctcagcctcccatgtagctgggatttcaggcatccaccaccatgcctggctaatatttgtatttttagtagatatgtggtttcgccgtgttggccaggctggccttgaactcctgacctcaagtgatccgcctgcctcagcctcccaaagcgctgggatgacaggcatgagccaccacgcctggccaagtttgacttattaaaacaactaaaaattataagtttcctcaatggcaccaactcagtctctcgatttgatgtaacacctctgtgctggtatattgggctcacttggagatgcaataaattgggaaaatcacaatttaggaatcattgatgtatgatcaagaatgtttgggaatattgtcttcccatcttggtctaaaaagtaattctggtttttgtcaagaaaacttgaacaagctatcaaagttacaatgcttggtttttttcattcttcacaccttttaaaaaaataacacaatttcaacacttaatgcataggcaacgtttgcaagttggattcagatcattttttaaaggtgtgtttccgagagttcactttgtgaatggttctgccagtggttttgttttactatttctgaaaaattaacgtatatatgtatatatgtgtaagaacttatgtattctgcaaaacatagtgtacctgtattatcttttctattttccagttaccctaatgttcagttatctagaaaaataacaataaccatagccaactattatggaggacttaaccatgtttcagtcctaagtatttgatttttaccaaacacttaacatgacggatgtgagataggtattattatccttttttgctgatgaggaaagtgtaggcagagagaggttaagtgacttgcccaaggtcacatagctgatgagccaggttgtcttcagcactaggcttaaaatgtgaccacaaagctattgcttatcatacttgtagagtgattatactgactaatttattattcttagtattgatttggcaaagtaaggctttcagtcataaggaatcatgaaagtagccattaggctctgccacctgctacacatccttattgcagttaccaaccctacctaggtcacttgccttcctttcttgaagattttatttcctggatgacaatgcatgtcataattcttaataacttcagtaacctagagatgatcctcccaatatcatgacctctcaggttcttgacctcttcccccaggatcctgtcctacacccaaccctagccactcactccacagtcatagcctagaatgctcatcaccagtaaatgagacccctccacaagctctttgtcaagtaccttcctctccagtcagacaaggcttcatctcctctgtgccctataatctgttaccctaccaccttttcactgtatcctgttctctttaccatctccttttgtgctctgcttaaatgcaatgtaaaagccccactcatccacatcctcgcttgccttgtccgtatttcactttgttttagtgtcctggtaaaaacacaatgccggtgaaagccagctctttgcctagttcatgcccacacacatgtagctgactgtggctggaaaaaaacacacccccaggcgcgatgactaacccaagtgggcccttaatggtgcctggcaatcagaaggcatttcccgactccattccctcttcatttctgggacaactatttcatatcttgtctcttcaaaccttccacacctcctccccatcctcactcttagctgatgacattacttcctttttctttgagaaaatagaagcaatcagaaaagaattgccaccagctcccacggccacatcaacccacctacgcaattgcatctgtgcccgaatacacgctcttcacttctgttactatgggtgaaccatctgtgctctgggccgaggccaacctctctatgtgtacattagatcccaccctctctccaaaaggtaattcctgtccttcctcccttctctatttttttctctttctttctttgttggagtttactcatccacatacaaatatgctgccattaactcatctttaaaagtctttttcttagccccacttcccctcccagctactgtccaattttcttccttccttttacagcaaagctctttgagagaattggctctttcttctttctaaattctcttctctcattctttctaaaatccattccaatcaagcttttatcttgccatctaccatgtgaagtttaccaggctttgcctcattcctcatccaatggccagttctcagtcttcttacatcacctgtcacaaacatttcacatagttgtccctttacccttgaaagactttctttaaggcatggtggctcatacttataatcccagcatgttgagaagccaaggcaggaggagcacatgagtccagaagtttgagaccaacctggccaacaaagcgagactctgtctctacaaaaaataaaaataaaaaattaggcatagtggtgcatgcctgtagtcccagctactcgggaggctgaggcaggaggattgcttgagcccaggaattaaaggctgcagtgggtaagctatgattgtgccacttgtagtttccttcctactcccctggctgtacctttctggtcttccctattctttcaacaaatatctgttgagctttctcagttgcaaagcagtgttttaggcatttgtgatacatctgtaagcaaaacagacaaaaatcccttcccttaatttaccttctagtgagaggaggcagataaaggtaataaatataaaaaataagtaaatttaggttagaaagtaaaaggacatgggatattaggtgttgttgcaattttaaatagggttgtcagtgaagcctcattgaaaagatgacatcaaacaggcaagcatattccctaccttgaggtctttacccttgccatccttctggaatgttctcatccctcagtctgaaacatcctcttactgatattcccgttgtgttcttcttcatctctttaaggcctttactaaaaggtcccctcttcatccacccttttctggccacctcttttgaaattacaacttcccccaaactccccttcccctttcccatttgatgtttctctttagcatttatcatcatctcaactgttaccagttttaatcatttatcttatcttttgcttgattttctgcactataatgtcaactccataaaagtgggagttattgattttttttcactgttgtctccccatattcaggctctcaaaattgcaattgggtcaatattgataatgcatactttctaaaaatgtgtgcatttgactaagtcttcagaattattagcataaaattgttcagaatattgttttatatattttgtggtgttttctgtgcctatgtatatttccccaatattgtttctttgaactgcctcactttccttaatcacactttggcattgttgatttgctccacaatgttctaaccttcttttttcatccattttatttctttcttttcttttctttttttttttttagatagggtctggctctgttgccgaggcgggagtgtagtggtgtggtcatggctcactgcagcctctgcctcccaggatccagtgatccttccaccttagcctcccgagaaggtgggactacaggcatgggccaccacacctgactaatttttgtattttttggagagatagggtttcaccgtgttgcccagcctggtctcaaactcctgggtgcaagtgatctgcccaccctcctaaagtgctggaattacacgcataagctgcagcacccagccccatttttttttcccaaaggaatgacagtattttcatgatatggctgctatgtgagaatagactgggttaggaatggagaccagaagccagggtaccatttccatcatccagttagagtgctttgaacaagggaagtagctgtagagatggtgagaaatggacagattctgaatacgttttgagggcagaacaattttcagcattagatacataccgtgaaagaagaagagtcataaatgacactatgatttgggggctgtgcaactgaaaaaacagtttctatcaattaagaataggagacaatgaagcggctttgggaggaaagatcaggaattcagcttggggcatgttgagtctttttctcatccaagaggatatgtggagtaagcaataggtaagagagctcagggaagaagtacagcttggagataaaaattcggagtcattggcatctagagggatgtttaaagctctgagactggataaattaaataaagaagtatatacagagaagagaaagggaccaaggactgatcctggagggaatccagtattaagagattgaagagtagaagaaccaataaaagtctgagaaggagcaaccagtgaagttggaggaaatccagctacagtgttgtcttagaagccatgggaagcaaacgtatggaggatagggtattttcagaagaattgccacagtgatccttaaaatgcagctgagataatttcaccaatctgctcaaaattcctagttggcttccattatcaaaacaccacaagttcttataaagaccattcctgcagccctttcccttctttacccaacaagctgctataacacttgcttcctttgctctatctcatttagagaggcatgttgataaaccccacagtgatgttgatagttcaggttctccttacagttctatcagtttttcctttatatattttgaagtttaatgggcatgctcaagttcaggaataatgtaccttctagtaagttgaaagtttaatctttatgcaattaattatagatggtttccaacttatagtgattcaacttacaatttttgactttacagtggtgcaaaagcaatatacattcagcaatgacatgtgatatgatattcttatatgagatattcaacattttattataaaatttggctttatgttagataattttgccaaattgtaggctaatgtgagtgttctgagcacatttaatgtcggtgaagctaagctataatgtttggttggtttaggcgtattaaatacatttttgacttacaacattttcaacttacaatgagttttattgggacataaccccatcatgagtcaaggagtgactgtacttataatgcttctgttctgaaatccattttgtctgatattaatgcatttatatcagatttctcttagtatttgcctgacatgtgttccattttattaattttaacctatccatgttcttaatgattaggtgtatcttttgtaaaaagaagatagttctgttttgtttgtttgtccaatttggtaatctctgtcttttaactagtaaatttctactttattcacatttatttattattattgatatacttgaatttgtttctagcatctgagtctttgctttctaactgttctactttttcttcttttctactttcttgctatttataagttgattaaggaggttttgctttttgtctccttcctcatttttcttattccatggttttatttctactagcaagaaagttataaactctagttgtacagtatgattgccctcaaaatttgaccttagatatttaacaaaattgaaagttagccatatcttaaccccctcttaatcaatataagtaattatgaatactttaaccaaaccactgtcctttttatcttacacattgttgtcaagtattaaattattgacatttttctagcatgataagtttgttgtttctgctggttctcactcatggtggcttgtttcctgtggttcgtggtctctgctttcctcctattgtatttgcatttgctaataacctggccatgttagccctcattgagggttctgactaaatggaggagatctcatttcagtgtcctcatcctgttcacattgtaagactcaatctctctcagcagtggtgtagatatttgcccaggacaatctggatttgtctatttgttttttgcctacaggtctgtgatctagtttttgggtcatgttttactaagaatgggggacctaaaatatttcatttacttcctgtgaacccagcaaggtgaattaaaatcatatattttgcccagcatctagctgctttatagtgagatggcctttcagaggaatcagtgacatcatgccaactgttgaagttcttttttttttttgagacagagtcttaccctgttgcccaggctggagtgcaatggtgtgatcttccctcactgcgacctccacctcctgggttcaagtgattctcctgcctcagccttccaagtagctgggactacaggtgcacgccaccatgcctggctaattttttgtatctttagtagagacggggtttcaccatgttggccaggctgatctcgaactcctgacctcgtgatccaccagtgtccgccacccaaagtgcggggattacagacatgagccaccacacccggcctaagaatttcttttatcatatgtgtgaaaatgtttttgtttgggtagcttgtaaagactttttcaatatagtagatacttaaaaactgtcacaaatcagagctagctggggtgataactccaagtgtgctctgcagtcacttgggaaagtttcagcccaaccataagctacagtaatgtgtctgtgtgtggtaaaggaggtagagaatggctagaatactcatcatcaatagctgctctaagaacacctgtttgttctctaccctcctgtgatgagttcttggcttcacataataccctcccttgaggcacacatgacttgtgagtatctctgcacttaccttcagagtcaaagcaggtcaaaatgtgatcatagcaaaatatatcaggttagaaatagtttggccctaaggtttttctaccatgttaaaatgtcatatgtgggcaagcatatacaaacctgaacattttaatttataatagaaaagttttcacttgtcccaccaagtgtgtctcttgattttaggctggttttgctactaatttctctaatttgctaaattttagtatgagataaaaatattaattttaatgtattattttggtggtctaatatgtcttactttttcaatgagtgacacatttttaagtactgtatttattctgcaatcaagacacaaactaagctctagaaattaaggcatgaatctcctttcacctgacttcttccttgcttctatgtgagaaattggtgagggagtgtaaaatacatgtacatctttttagaaattagtttgtaaatgatgaaaaacacagcaaacaaatcaaagaagattcaaattaacctaaataaatgaatcaaacctgtggagttctatacagtctataattaatatttattaacatcacatttaatcttctcactgtgttacctatggggtattccctgcacttgtttgaaattttctaatcaaaagggtatttcaaaatatattgtaatatgattgatttactttagatggcaagcaaataccactttataatagtctgcatgcattcaaagtaaaataacagtagaaagcctaatctcttttgccattaaaggtttcaatttgtcatgctcagttttaagcttttaaaaaccaacatatccagaaaggcaaaaaatactaaaatcatttcatagcagtaattacattttcctttggatcatgtgcctttaaaacgtctgaatgcattgctgtgcaagtgtcatgtgtgtttaaaagatgcataattattagatgcagttccagcatagtgttttaagtacaagcacccagctcctattcaaggtaagagcctttgacaggcaccaagctgcctctgaatgtggcagcgggatcaaattgttgaatacattgactcatcggtgcgggctggaaattatgcttcttagccctctgtgaaacatgtttttcatttcttatttttttttaaactgtatcttaggatctgcttcaaaacacggatgcccacaaaagagcattccatgaaatctaccggaccaggtctgttaacgggattccagtgccacctgatcaattagaggacatggccgagaggtaagagaatatctgcatttaaatgaagtctctttttaaaacactaggtggacgctttttatatttcttttattttttcatgatttttttttaacagaggcgcctacctttggtaaatagaaagcgggctcccataagacatgctaagaatgccaccattctaatgtattattaactgaaaagagtgactctgaatttatccacagcctagaaatcacagaaatggtttcttcagaggctgtatttttgttcagtactgtaaggaacattatgtaatattgcaaaaacagcttataaaagaaacagacgagagatgtgttggcaggggaaagaactaaatcgaagacttcaatcattcatgctttgcttttaaatccagagctagaaaaggaatcggatttccagaaaatgatcagccagagttagaagagcttgtggctgcattctatttaaggctgacatgtaacaggttaagtaagcatcagttctgttactattagttacattctataaattctccctgttttatttctaggtttcattttgtttcctccacatcagagctacacctaatgaaaatggaatttttagaattaaagtaccgtctgctctcactgctggttcttgcagagtcaaagctgaagtcttggatcattaagtacgggaggagagagtcagtggagcagcttctacaaaactacgtggtgagtcccccgtgctttgacagagaattcctatgagccatggatttagcaacacagttcagtttctttgatgttgttattttaattcttgaatttaaacataaagatagcgtgtgttaaatgggttagatacaagtttatgagcttttcagaattatctgaaatctaaacctatttctttggaatttgattatttaaaatcccctagttcagtttagtttaatgctttgctgcattaatcatatgggaccatcctgactggctttattgatttttaaaaaaagtttttgtattgcatacccacattttttattggaggtcaccatttcaactacattaaaatacttaaagattaccttcatgtcttttaaaattcaactatgactagtttagaaccattctcaagtgtccaaatgggaactatctattttttttagattgtgtccactgtgtctttttttaccgtaattccctgggcttcattgcctcttgtgtgcaccctggaagagtaacattttgtctatgaatctctgtaccaacttaatttttaaggattatctcacattttgggctatcaatatagataattctatgtttactagaatcatagacctgcattgatgaaagaatttgtttgctctgtaactagcagttttcacttacatgtaattagtgtattatagatactaaagacaggttatttcttagttaattaaacatggccatcctacaaattaattttcaatgcaaatttgctcataaaattaatgttaatagagtatcttagtcttgtactgtttcatttatgtttaaacacaaatactatgataaatcaatgatcttttaaaatataaacccatttgtaacttgattagtcacagtgactctaaaacatgttctgcttgaagtacttattgaaaccatattttcactgaagcatcttagaactataatctgttttgctacattttaatttcattttctgtgacgggtgaacaacatacagttgagaaaaaaatgatttaactgctttacagtaaaatctttccctagatttactaaaattgtctaggaaacatttgttccaaaatgcaaaatctgttatgttcctttactcatttttagttgttttggaaagttatgaaaaacttgattttaagcttcaagcaattacgttagttcttcaaatatgaaatacaaatatgcatgtatattttcagatttagtcatgccaaatgataccctctcagcccagtagttatttataccagacacagtctttgttctggatatttcagaacagccaatcagatttaaacagctaataagactattccaccaggttaatgttccaacacaatgatattaataattctctttttctcaaatgatatgtgaataaacaattattaatgataaaaacgttagtactccctgcctacttcatcaagttcactcagctactaattccaaactgccttgtaactttcataactattcataaaattgctgattatcctacatacgtagcatgctttaattaacatttcctagtactctcatctgctactgaagaatacctacttatcactcgtgtttcttttctgtgaagggttttaaggtaattttgtttaatagttttgataaccgtggagtatggagcatttcccacatgccaagtgttttacatgcatcatttttcatctcagtgatggccctacagactgggggtttcacattgttttagataccaaggagccagtgcaggagcactgaggttccatagactcaagtcacttgctcctggcggcacacgctccaggtggtaaattgtggaatcagaaattgaatccatatctttccaaatcaaaagcccttgagcttaagtgctgaatatcacaatctaaaaaaaattgtaaaaaaaatttttaacttaacagaccaaatcattgatatggtatcttacgtcttagtgatctaaagaatgtaattcacataaatatcagttcaatttaatattggtccatacctgacaatattttacacttacatacctgtaagtgtactgtgaaagcctcatagttgctattagttatatatgaggcagcatggttgtagtggtggggaactgatgaagtgcagataccagccactagaactgtgtttggtcatggtttagctactgagcacccatgtgtctgtgaataacttaatttctagaaggcttagtctttccccagtgtttaataatgataatgatgatgataataataataataatgaaatggtaggaatttttctagggaacaaagactgacatatactgtttttattctatgttaacacctcatagagcctctcttatccttttagagtgttatggaaaatcattcattatagaacaggctatttcaaagaggctgaaaactttcaaataaaatcacaaatcaccaaagtcagttttgtaagtgcaattctttccttggtttacaccccccacactcccccaaaaaagggctgggggcagcagctcacacacacctgtaatcctagcactttgggaggcttaggttgaagagtcacttgaggccaggagtttgagaccagcccaggaaatatagtgagactctgtctctacaaaaaattttaaaaatttagcctggtgtcatggtgtgcacctgtagtttcaaccactcaggaggctgaggcaggaggatggcttgagccctggagttcacggctgcagtgagctatgatcttgctgctgcacttcagcctgagctacagagtgagaccctatttcaaaaaaataaaaataaaaataaagtattataataagctacatgcttctacatcatctaataaccaaagtaatattcaggccataaattttccgtaattatattttccttagtcataattctcaattcagacttatccgtcctgcaaaaaagaaagaatactttttttaagtgttagagaaagagaatgtacatccaactcagatatgcagccactgagtgcttaaagaattcttggaaaatacttcacaaatcctttctgtcattaatttaggccacatgccattggtaagtgattgcatgctgtaatgcaaaccaaaaggtaattggtttagtccttgctgtcagaattgttgacaatgaccaaaacatgtgcttccatttcaccatggaaaaaagaggctaatatttcaatctttcacatgaaagaaaaaaaaacagctcttgaaattgtggactgtgtgaatgcaacatagtgtgaatattcattttattattcataattatattttaatgtaaatagtcttgataaacctctcctcaatgttaattttaaatatctcgaataatctggcatagttgcattcaagtgaaattgatgagcttcatatttattatatttacactcatcttgtgaaagtagaaatgcggtcactaacactaaagttaaataccaaaaataagtatgccatttacttttcttgaagcaccatcaactttaaaagtcccctgattaaaatggcttatttgttgaacttgggatccaagtttcaacctcattttgaaagaaataaatgaatcttgttattattattttaaacatgcatttgtatttttctgacaggtgtgtctaaatagcttacagtaaaatggagatttagcagttctgccaaagtgattcaatagataaaataatccatattgctaaatgcatttactccatgttcagaaaaaaaggaccaaattaaatggaccaatacaaatttaaaatacaaaataggtatctttctttaaaaattaatcatccagtcttcctaatagccaaattcaaaaatacattaatgagtgtctacagcatttataaaacattctttctgaaaacattctcccctctttcctgcctcgtggaccagaaattaaattggaaataagattttctcacttgttcatttttaattattttgtaaacttctctaggaaaagcatatttaagtcttcctatgaaccacatgcactatttcccatttctttgacacttagaaaaattgttttgctattagcttcttgaaatttgtaccaatactaaatgcagattcttttctaaactttgccaaatataattatttcttcaatttcttacgcagtatcttgaacattaggtataattttccatttttgatcaaataatgaattgcttgtttagttaaattattcaaaatttaaattctagtaaattattcttttctcaactgggttgtaataagaagatataaggctaaatagtgaattaatcagaatactattgtctgactttattctcaaacaaataaaataaagccaattaaagttattgaatgtagtattcatcatggaacctctcattccagctttctctattcactttatccctgaagaatagttaatttataagtaaatgctttataaacataaaatgatatgaaatatgttatagatacaatttttaaaatgttatctcaaaacagttatcaataaaaatccagagatttctatgaaattgctgtatgaataatgtttcctctgcacacaagtgtcttgcatctctatattaagcattcatcagcgtgctatacaagaattcagctggtttttgaaggctaattttgtatttatgaccgtgacatttatcaagtattttaatagattcaaatcataggaactcattatactatcgcaagaaattaaagagcctttggtgatatgttcttaactgtaattgcattaattttctactttcaagaagtaataataatctttgaaatgcacattattttatattcctaaaaatgaacaataataacatttacctaagaacttttttgtctattctcaattttatagtattcactttccagtagtgattctattatatatataaattacaaatagatatataaacatgtcttactgcaatttttctgtaataggtcattgaaatgtgagaccattgataacatggatagaatatgtaattatttccaatttttttactgactttttattttaagggaagcatttgtgcaccgtcatttatttataatctggagttcctcagagcagtcattcaccaggattaatgttcaaagagcaacagaattccgcagctgagacacagtgggacactttaaaatgttcttctaaatttagtgctttctaaatgttagacccaagttctctggagaaatttctgtctcttcaaaaagcaaacccttggttggtgaagaaatagaatattttctcagtcctgtactgggttagaatcaaaagcgtggaatcaatttatgtgttcagaatgatcttaggtaatttgtagcagtggaattaattttatgttttcaagaagactgagattaacaaatttgggtaaactgtgcttatagctatactgaagaaaattgactttggcattctacatgagcctaatgtttgctatcttctaaccattcctccttttctagtcttttatagaaaatagcaagttctttgaacaatatgaggtgacataccagatcttgaaacagacagctgagatgtatgtcaaagcagatggttcaggtaaaacatactacagaatttgttgcaacgtagactgcagtagaatttagagcctgcaggtttctatctgatcagatcattctttctgtccgtggaatttttgagtgaccttgccattggccaggagaacacatactggattcagttcccttggctttgtacaatgcctaacctgcataatcattgtgtgtgtgtgtgtgtgtgtgtgtgtgtgtgtatgtgttcttctaagagagaacaaaataagcattcattttctaaattgcatctaaggattaaaggcaaaagcatagaatacgttaaggattaccaatcaagtaaatgagaaattaattagtgtaaagacacaatttgtaaaatacatttgttttccatttgtaattatgtctgtcatatttgttggaaatgaactctggcatttgtgatggatactattgcacaccaatgtataagaccatagaaaaaaaggtgtagaggatttaaaatatgagataagggttataattggttttatctgtttcagtggaagaagctgagaatgtgatgaaattcatgaatgaaaccaccgctcagtggaggaatctctcagtagaagtgaggagtgtgaggagcatgctggaagaagtgatctctaactgggatcgctatggcaatacagtggctagtctgcaagcctggctagaggatgctgaaaaaatgctcaatcaatcagaaaatgccaaaaaggtaagattggttcatgcaaaaagaaaagacgtttgatgtatgtaaaaatgagagacttttacagcgtagctcactagggggtcgcatatatttacaagtgtcactcaagaatcttgactttgcctgaaaagttgcactttcaggttagcaacagaccaataaatacactgcttaatagaagctgatggagggttgagtaaatccaatgggcagcaaaggggagggcactatattaccctgaagtctgtctatgaaggggagtgtctagggccccagccttcatggatttcctgatttaagagaggatgaaaacaactttgttttcacgtagtgctgaaacacatactactggatctatgtggtagcatacgccagttgaacaactggaccatgacatttgtatctcgttagatattctgttttggattttatcaaccttcaagcaagggtctcattctgggtaggagtgatttattttttggccagttataagtgtgtatgtgtgtgtgcctgtgagagttactgttttatgttaatgtcacttatatgtaaatgtcacatgaaatggactgatttctgcttatatacttcctaatgggagcctggcatttttacatggaaaatcaatttatatgtaagtgatactaaaaatgcatgcattagaattaccacatgccatccaagattggttcatctattattgtttggacaagtagatgtatcacttttaaatgttttaccattccatatttcatgtagatcaactattcttgtgtagctgagggaggcaataactatgtacccatacagattttggcttttctgattagactggcagtgccctagtggatgtcatacatgttaatttgatcaaaagaaatataaccaccagaaacagaagtgttctaatctatttatatatgtaggaaagtcctcccacacaaggcttacgaaatggattttgaattatctttggtatccttgtttttcactgtgatgtgtgttgtgtgtgtgcgtgtgcacacatacgctttatttaaaatgagttggaaactgtttcattgccaagagggaacccttaaataaataagaaagtgtgttattgtactaagtgctcttgactcagatatttaatttaaaattttttgcttcgatggtttatctccatgattgctaattatcttaatgtactacactgaaatttaaaaatcaaaagtagcaggtcaaaaagaaattattaaagaaagctattctttctttaaaaaggaataaaagccccaactttaccaccacacaatctatgcatgtaacaaaattgtactcataccccatcaatttatacaaataaaaaaggaagctatatatttccctaatgtattatgccttttatatgactctggcactggtatttactagcctgaaggttatgcacaggtctcttacacttacagaaattcagctttttaatctgtaaaacagaaataacagaaaatggtcatcatgttttgttttgtcttcggcaaatgatatggcacaattgttcttataaaaaaagacagtatctctagctcacattttgaaactttttatcaaaaatgtgcattttaaagagatttgtgatttatcttaaaattcacatgaatgttaaaacaaaaatatttttcctactttagtcactttcatatcagtcactgatatttggtttatggtttatgatattgtgcattatttattgtttaggatttttttcgaaatttacctcattggattcagcagcatactgccatgaacgatgctggcaattttctaattgaaacctgtgatgagatggtttcccgtgacctgaagcagcaattactgttgctaaatgggcggtggagggagttgtttatggaagtcaagcaagtatgtctttcaagtctatatacacctcaacgtgtatgtgttacaaatgtgataagtagtctgtttagagagaatgctatttttagagcacgggtttattaaggcaaagcatagatatgtttaaaaccggtgtgttttatggttggttcttcattcttttccatgtataatggaggaatattacacaaatgcattagtttgattaaggattatgttgacatatggagcctacttatatggaatgattctcgtttcaaatcatatttcttcattttcatgctagtttctttttttctttcaaactaattggacttacttcaaatttatctaaaatgagaatcaaagattagagtctttcttaccggataacaattccagcgaatatgtgaaagtgaaagttgtggttccagtggtcgcagctaaatggctttcacgatgttccctcctccctttccttaacagtatgctcaagctgatgagatggacagaatgaagaaggaatacacagactgtgttgttaccctgtctgcttttgcaacggaagcccataagaaactttctgaacccttagaagtctcttttatgaatgtcaagctattaattcaagacttggaggtgaggggtttctgaatcaaaatgaaaagcctactctgttgtgagaggaaagatcagcaagtttattcagatcattgcaaaagctgtttctgtgtctcctgggcatcattttgacatgtctgtatgtcccaatttgcacctgtcagaaaaaaatgtattgaacataaaaaagacatgacttgatcatataaagtaacttcaaattgtttctcagtttggagattttttttttctacaaccaagttaaaaagtattaggaaaaaacaggagacatctatagatagcacccgcacctaaatactttcaataataaaggatttattgcatgaactgtggtatttgcatattttgaatagcctgcagctctcacaaatgaagtagtggaagaatttttaatgacatggtaagattttgcaatatattgttacatgagaaaagcaaacaacagtatcattcttttgtctttgtaaaaattttaaaatgggtgtaaacacaggaaaaaaaaacttaatgatgtatagataagatgttggctttgggttttactgtgggagaagactataagtaatttaaattgtcattatcctaatatttctaatttataagtttttataatggcaatgagttacttttttttttttaacgaaaaccagtctaatttttaaagtcagaattcccccacattttaaatatacatttacattttattttatatttccatactacattaacatgggatttgttttggaaagtacaaagatcatttcagctaatcttgatgttttggtcacttttaaaggaaaattttattaactatataatattaccaatatttattagtaatgaagggaagcaaaaactggaatcgtcgaaagtttagtgtaagtattggattttatacagtgcatattgatttttgttctgccttctgtggaatccggaagttaagaggaaatgtgtcatgtatgaatctggctgtttcaatgattcatgcaggatattgagcagagggtgcctgtgatggatgcccaatacaagataattacaaagacagcacacctcattaccaaagaaagcccccaagaagaaggaaaagaaatgtttgcgaccatgtcaaagctcaaagagcagctaaccaaggtgcgaaaataatttaatgcacaataggctgtgtgacaccaacagtgccttcagcttgcttgctacctccttctccccatgggcaaagtgtttacttgttaacaatgcttttgtttctaattgggattctcaatttagtaactttgtcatgaattaaaaaaaataaaactatgatgctgataccaagtattacctctgttaatttagaagtattatagctatattttaatagaaagttagatacttttggggaacggttacatgtgataaaaccaagagagggaaagagagataaagagaaaaaggagatgaggaggaggaagaagaggggatcataaatttaaatgagaattggttaagatttgtttgatatatctccactccaaacttatttgtgcaattttctgcaagcatagccacaaagccgtggaaattctgacctcctcatctcatggagctcacttaggcttagaatatatacatttaggccaggtgcggtggctcacgcctataatccagcactttgggaggccgaggtgagcagatcacaaggtcaggagttcgagaccagcctgaccaacatgatgaaacatcgtctctacttaaaaatacaaaaattagccaggcatggtgtcgtgcacctataatcccagctactcaggagcctgaggcaggagaatcacttgaacccgggaggcagaggttgcagtgagcccagatcacgccatttcactccagcctaggtgacagggcgagactctttgtctcaaaaaaaaaaaaaaaaaaaaaaagattatatacatttataccttttctgtacagggaactagggaactagatggatgtaagcactagtcataagcattttctagtctattcagtgattttccttaagagctttggaagttccattgggatttgttatctatccaaatatgaattttaggaagatggtattgtttgcaaaatccacctagattgggtaattaatttccagtaaaagagagaagtgattataataaatgaatggaaatattttaaaatgaagaatgggaaaacaaagtagaaacaaagtagaagaccctgttaaataggaaagaaaggtagaaaggaagagaataacctctgtgacatcagtggtagggaattaatgaaaaagaatgcattcaaaaagctaaaataggaaaaatcatgaccataaaaaagagaaaattttatctatcaatatggtatgtatgagaatgtttatgttcagttcattttattttaacattcaagttagaattatttataatttaaaggttgtgggcaataatgataatattggctactagtaaaagctgctaaacaataagtacaatttgaagtcaacatttccaatttgataactccccagcagctttcagggccatagctgggcttgcacatcttagcctgagccatgcttaggtgttcaggacaacccctgagaaagcaaattgtcatttgcctttttactgtttcagatgcagcatcttgataggttttctcttctacccaggagagatcaataaaacacactgatttgtatacacattagtagactctcttggttttgttcaaggtaattatatcagagtcttgttgcagtagcaggatggtaactttcttttgatgagtgtatacttcaggcagtatatcctagaacataaaaacgtttcttcatacataattctatgtttaacagtagagcaaaatgttgccctctcccactttcttcaaggattactttttggaatatgcctcatctggttagaacattattgtctttatactatatgaaaaacaaagaatggcttactaacaaatactgattaatttcctttccctggttatctgaaagtatgagaagaggtgggaagttcttggaggatgaagagtagacacctcctggagctcttgatttccaggagctagtggcctcatctttaagacaatgcaggtctataaactaaaacatgttttacaagacaagtgacaggtaagggctgcatcagtttggactacagagccctcccctagcatgggaagcttcatgaataaattggtgtgactttagtgcttcggatgagtaggatgttgataagcagggagcagcaaagcatggagctggtgggaggcaggaaagcacaggcctgtctgggaagagtgagtcaacaggtttctaagtttatcagcagtcaagggttcaagtaggcgatctcttgaaaacaaagctggaagacacaggttggtctaggtaatataataataattcatgactgtcttaggtcagatttcaaggccaaagtgaaaatgagttgcatggtttatgaagtataatttgatgccatctggctcactaaaaacaatcatttagatgagaaagtgctatccagatggacgatttagatgaattttcatgagaaaactcagtagccatttatttgtctcagtggtacagcactattatttttcacagcaaaatttgacaatatagaggaaatatcattaaagaaatgtctttggatatttgtaagcaccaaatgatcatgtcactaaagaaaatgttcctcagagctatgaacgttccctgagctagtggcacttaatggtctttcatggaatttttgtctttatgtttttaaaggtcaaagaatgttactccccactcctttatgagtctcagcagctgttgattccgttggaggaattagaaaagcagatgacgtccttttatgactcacttgggaaaatcaatgaaattatcacagttcttgagcgtgaggcacaatcgagtgccctttttaaacaaaaacatcaggtgagaacaatccttttcaggagacaattattctaaagcatgtgtaacaagaccagggtgttgcttacaggaatagaaattcagtgaggacaagaaacatttttctagaatagtactactaactcaaaacaaaaatacatgtcttgtccaaagatgaaaatccattcactgtcagtgcaggggctatgtgagctgtttgtttccagggaatggtctagctggactcaggtgcaaaccaggctcattcatctgaatcagtaagttcactgagttgagcaaagttagaaaaaatggtttgttttgagcacccagctcccctttctatcaatggagcaacattgtgatctggcaatactcagcaagcatttataaacatctgctgtgtgcacgcgtaagccatgcatcctgagccccaactacagaaagtgcaaagttcacaatgtctctgtgaaataagggatgtgttatagagatggagccaaatccgccactctaacttcaaacattaagggtacccataatcaaaggactttctattatttctctgctttgtatttatttacttttcttatagttcctgcctactagcaatagaccacatatagtctatccttttaaaaatacagataagaatttatttacattaaactttttatgggctttgttcatgaaacgtgatccctaggtttgctagtagaaagacactataagaaaattaaataaatatcctgtctctacattacataactaaaagataaatatatataaattttatatgtataaaacttatacagagaggatatttatataaaatatataaatatttgtattatatatacagatataatattttccttcttatattgactttcttttggagaatcatttactgttgcttcccacacatagctttaggcattacctgctgccttgctgattgacgaaatggttaatttcacttaaaaaggtatatgtgccttcttttcttgatactttgaaaacagatagatagataggtagacagataatttgatatatatttatatacatataataaaaacaattgctttccattttcatccagtatccataacctctgacttatgagatctttactttgcttcttgaaatatgacagtttaaacaaccttgaaactctggaaatgtgtttgatgtgataatcatttttctttgtctcatttttagtaaacagattgtatgcataacagtctcctactgagtgttgtagttaattgggttatttggtttattataatgaacctgtccatcagaagagagagacactaatgtacaaaaggtttgccactgcattaattgacataggttcatgggaggaaggtagcatcattagtagaaagagccgagagtgtctgaaatgagtctgacagatattcagatcttagatctaatattgcaaattaggaagctttgattagctttaacttcctcactttaagatgaaggctacaatacctgagtgtaaagcttattgcagatattacattagatacaccataatgtcactagcatataagtggcactatatgactgatagcattattattattattatctgtagtgaagccacaatgattataccaccaaactgcattctcattgtattggatagagattatctttcatttttagacatggtgatatctcctacatttctaaatttgtacaagttgtcattatacaatctttccataattaaaataatgttcatagcattattaataataaaatctaataatacattttggacttatattacccttttatctcctaagttttcaaaaggaaaaagtatgtctttattctgtttttcccaaaacaaacaaacaaaaaaaccatgctcttgatatttgcatctggatatccaaaaatggcatccaaatgagcagtttgaagtatttttctaacgcagttgaggatactgaaatgcaaatggtgtaattcaagccaaaaaatgaccctctgccttgtgctgggctcaatgatttccatgctgtctactgccaaaatcacaattgcaggctacaagttagaggtggaggtgtctgtaagtcaccattgcatcttgtcctgcagatgtgcagcagttgcaagtcttccccaagtgcatcggtctgctgcctttttttattaggatctgaaccctaccatttcattaataaggctgataggttgtacaccttcaaatattataaatttaggatatactatatatatatatatagtgcatctctttcagcaaagtgaatgtgcattgatgctcaatttgtttagtcacattaaaacctgatatgtattcattgatttcatgattgttctctcaataaacaacaggcctatcatcttactagaggaatgcagacctagacaacttttgatgctctatcattttcttaatgacaataaaatgtacatgaggtatttaaaaatctcaaaaaaaaaactctttgtaacatttaaatgccttatataagaaagcactgacttcagtgattgtttaaaattgagatcttttgaaatgttccaccatacttttggttttacttattggtgttagaagcctaaaagctatataatgttgttcttattatctgtaatggtcactctctttctttctctctcactctgtcttgtaaataacattgttgtggggtttcatttcgttataggaactgttagcttgtcaagaaaactgtaagaaaaccttgacacttattgagaaaggcagtcaaagtgttcaaaagtttgtgaccttgagcaacgtgttaaagcattttgatcagacgaggctacaaagacagattgcagatattcatgttgcttttcaggtaatttgctctccctgctttagagctgtgagccagggaaaatgcagagtgaggacaagaaaccatcactcgtgcttttggtcttgctaaaacgccttacctgctggtgtttggaagccaatcattgtcctacttttttacctaatattaattaatattgaaaagagttaattattcccatgatgatgaaatgtcttttttccaagtgctttttaaatgaataataccctctaacaaaatgatcctttcagtaatgagaaagcagcatcatattatgattgtttttcacatcaagagtatggtaaagaaaactggagattggaagaagcatgtggaaaccaacagtcgcttgatgaagaagtttgaggagtctcgagcagagttggagaaggtactgcggattgctcaggagggcctggaggaaaagggggatccagaggagctcctgcggagacacactgtgagtccaccctttaggggacacttgacctgaatacatggacaaacaaccttggaggaaagcttaaaaaaggcatgctgatctgatacagaaggagagcgggcagatgagtcagggaagcagagactttttaggtatgagacccaaagatatggtgagcaaaaagaacttcaagagagttggtgagctgacttgtcattggccattcctaagtccccagaatagtagagagtcatagaataattcaagttatccaaattactaattcattatttagcttgcaaattcttctataactaaagattcttttaaacagataactcgaggtgactagctaagtcctttgtgctcattttatacattcaccatatcatagtatagacactgtgtcacttgaagtctggtggctgatacacaacttgtcccagtatcttcatgtttatcatcttcatgtttatcatgaaaagccatcttcatgtttatcatctcaatatcaatattgggaatattagtcataatgttcatgaatggtatatggaaataaccagcactctgagaacatgtatttgagttatctttcctgacatttcagtggctatttgtataaaccacactctcaaatgatatatgcaatgtatttgtgattctgcagactagatttagggttaatgtctgtgaccacaaaacacaaaacatctcattcagtttattcacctctacagtatggtacttcttgttttgaatcactgtttttacaaaataattctgcatgtctactcctgagactgtgtgagacttagtcatatgtaatatgtgcatgtgtattgtctttatctacttgactgccagagcaaaatgccatagacgggtggctaaagcaacagaaacttatgttctcacagttctggagaagggaaatctgtgatcaggtgctagtatagtagggttctggggagggccctcttcctggcttgcagatggctaccttttccctgtgccctcacatggcagagagagtgagctagcaagctttctggtgtccctcctcataagcgcactaatcctatcatgaggaccccatccccatgacctcatctgaacctaaccaccttccaaagttcccatctccaaataccatatgagtctgaagaagaacacaatttggtgctagcatgtgtgcctatgtgtgcacatgtgtgcttctgtgtgcacatgtgtgcttctgtgtgcacatgtgtgcttctgtgtgcacatgtgtgaatgtgacaatggctcatgatgaagcatcaggccctgaagcactgtggttggggaatgtggaattatgaggcttagtcctggcttctgttctgttcttctgacttcaccaaaggggaaccgaagctctatcgctacagaatcaaggttttggcatctccccttggaagatgagatattccttttggaatattctaccaaatttgaaaatcacaaagaatttttctaaaaaataaaaaatactagtagaatttcagatatgatggcttctgattcataactataggtgcacatagttcatccttaaaaaacaatagtgggtgcctggaagtctgcaagagggcagcagctggctgagaggcttgtttggaggcttagaggctgatcgtgcctggtgctgccttttcgtctgtccaacactcttacccactttccccttccatgtcaggagtttttcagtcagctggatcagagggtgctcaatgctttcctgaaagcttgtgatgaactcaccgacatccttccagagcaggagcagcaggggctgcaggaagctgttcgaaagctccacaaacaatggaaggtgagtcaggacaggacggagacaccgtgcatcctcaatgaagggagaagcttgagcgtgttaaggtccaaatgtaagagaaatttagaaattcctggaaagtcactgtaactatttcgctcatttaaaaactcaaaaaactggacttaaataaaacctgataatatatgatagaattgtgttattcctatttattatcagcatcaattttatcctattactcgagcattctttttggtttcctgatttttttttaatccagggtgcaagaacatttaacttattctagcaacatttcataagcttctctctgctgaataaatcttgctaggtatacctactgaaatcataaaacatgtatgtatagtttctgccccccaaagattttatcatctagttgagatagctatgatcaaaaaatataaatgaaaacattttgtagtcaagaattcaatgatgaacaaagcatacccctcttccccccaagagcttaagagttcagtaaaggagataattagttgcaaataatacaagtataaatatgataaatccaaatgtgcatatatttatgaaagctttgaaagagggaggtggaaccacttggaaattggaaaacagcgaatcaggtaactagttttgagccagaactttacagaagaagcagaaatgggagtaagcagggggtgatacaacagcacagaagggagaaagcaggagagcgtgcagcgggacgcgggggcccgcgggcttccgtctgacttgtgtgtcatgggctgtggaagaaccatgggagatgagctgagtctgtcccatggaggctgacttcagactgcatgtcagattctggaagtagctgcagcacagtggagacccatggaaggctgtcttccttgaggtagacaggaggaagacagctctagctttaggtgagtgtgtactaccttgaggtgatatttcacatgcgctacatggaggagttttggagttcagaagattggcagctgaaactctctccatcaggttgtctcactttgtgtatttttaagatctcagtaacataagctaaataattatccctgtgcacaagaaaaacacagttaaagaaatatccttttcacttgctatattactaaatttgaaaattcaagtttttcattaaaaaaaggattcttaaagaaatccaagctttgttagatgtctttgaagcatatcatattgtaaatgtattatggaataaagactataactgaaggttgtattttattacacacacacacacacacctctaggatttaatctaggtgggactttccataggcccacctcatttttctcatcagtcatcttagtattctgtttcaaaggtaatcctttaaaatgccataggatagaagttagttaaaattaattatgggactaaaggtaatgatgaagcttatgtttatcatttaaaagaacatgaaatgttatgtagtgtttgagtgcttgcttgcttgtttctcaatgtatgatctaaggaaaagaggatatggcaggtggtcagcagcctgggctatgttttctttttttttttcttttctttttaaaactttttttcagtaataagctttcctcatgttctttctttttgaagtgggtataatagctgcccctcctacctcacaaggtcattgacaaaatcaaaagggacacatacaggggaaagggtatgatttaaatctatggtaaaatcctagcttttgtacttacccctgagacttaatgatgtaatctgtaaaataagaacattaatactgtgcagcactggccagacttagtggctcacgcctataatcccagcactttgggaatctgaggtgggtggatcacctaggtcaggagttcaagaccatcctgaccaacttggtaaaaccctgtctcaactaaatgtacaaaaagtggctgggcatggtggtgctgcctgtagtcccagctactcaggaggctgagacaggagaatcgcttgaacccaggatgtggaggttgcagtgagccaagatcgcaccactgtactccaccctgggcgacagagcgagactccatctcaccaaaaaaaaaaaaaaaaaaaaaaaaaaaatacggtgcagggctactgtgaaaattaaatcaagtaatcactgaggaaacacctaacccacagcagactgaaaggatttgctgtggtcctggtacttggaaaaatacaaagtagagagaccaggtgtggaaagtagtgacccattcacactggccctaaaaggaatatgttatggtttttgttttttttttgccacttcaattgggaatgtacataatcaggaacttcatcctaattttctgaatcttcctatggaatgtaggatcttcaaggagaagccccttatcatttgcttcatctgaagattgatgtggagaagaataggttcttagcctctgtagaagaatgcagaactgagctggatcgagagaccaagctgatgccccaggaaggcagtgaaaagataattaaagagcacagggtacgtctcccacaccacaatgtggatagccgtgtcaagtcacattgttccataaaggatattactaatattttggtttgagtctgaaaaataatagcttaattactctaccttggtagtctgcgtgggaatcttcctttggtttttctgtgaaaatgtagaagtactgtgtggcttctcacagggattataaaaacatttattacacattaggttttcttcagtgacaaaggtcctcatcatctctgtgagaaaaggttacagctcatcgaggaactctgtgtgaaactcccagtgcgggacccagtaagggacacacctggaacctgtcacgtgactctcaaagagctcagagctgccattgacagcacctacaggaagctcatggaagacccagacaagtggaaggactacactagcaggtagcctcagaatggcctccagagaggggtgtagtcaaacttaattctgttagttcggagatcatgacaaaacaagaaataacttatttcatatttcttgctcatgttctcgtacaaaaatccttcatttaataaaaggaatggattttagtcagaatcagggtgaggcactttgtttccaagtgacccagatgttatctctttgaggcaaagttggccaatccctttctccccaatatccttatgtattagtcctttctcactttgctaataaagacatacctgagactgcgtaatttataaagaaaagaggtttaattgactcacagatcagcatggctggggaggcctcaggaaacttacaatcatgccagaaggggaagcaaacatgtccttcttcacatgatggcaggaaggggaagtgcagagcaaaagggggaaaagccccttatgaaaccatcagatcttgtgagcactcactcactatcatgagaacagcagcagcggggtaactgcccccatgattcaattacctccccccaggtccctctcatgacatgtggggattatggaaactacaattcaagatgagatttgggtggcgacacagccaaactgtataatctcatatccctaaagggtggcttcttcctctataggttcgtgtctcaccctggtggggacacacgaggccagacctcaagtggtcccttccttcttttcaggtgctcattccctagaacacatctttttccttagctgagctcccccatcaccctgcccctagtaactgagcatagaggcggccacccctgccctttaacatgagcttcatgttaaaagaatagtttccagaaaagttattaatcaatttggtaatcacttaattgttaaatttccatgagtgaattcaaaatagaaaacatattctgatcattctggtatgttctccctttaataagaaagtgcttatgttatttcagattctctgagttctcatcttggatatctacaaatgagacacaattaaaggggatcaagggtgaggccatcgatactgccaaccacggagaggttaaacgtgccgttgaagtaagttcagggtcattatttgctagaggaaaatttctcatagtggaagaataatgttagagaatctaacggttctctgcttttttctttctggaaaaaaaataagttcttgaaaattgtctttaaaataagtccccttatattactgtggagcatgtagagttttttcctattgaatccttggtagctttgagggttagtcatgctccgtggtgccacaaatgcatctttagctaatggggagtcctgagtggaaaattgcatgcatgggcgtataacccagtagaaacttaagaatcatcatggaaaacaagaacactgtatgcttttatacaatacattttcagccatgcaaaaggcaggtcacagaaagatcagggagctgggcaaggtctctaggcatcctttctatgtgacattaagctggattggttcatttcagcctctatcagtgtgggtacagcctgaaaaaccccaccagggccacagagcctcaggctcaaacacagtttgcattctgtaaatggcactctctcactcttagacacataatgttgtaaaaagtcttcatctttgaacatttttaacccttgcacatcacaaagttgccacatagttgctgttggggagaatatatttcctttctgttcctgtcctttgagtgtttgtttgtttgtttgtttgtttgttttttgagacaaggtctctgtcacccaggtttggagtgcagtggcaccttcatagctcacttcagcctcgacctcctgggcttaagcaatcctcccacctcagcctcttgagtagctgggactgtagtcacatgccactatgcctggctaatgtttgtattttttgtagaggtagggttttgccatgttgctcaggctagtttcaaactcctgggctcaagcgatccgccctgctcggcctcccaaagtgctgggattacaggtgtgagctattgcccttggcccatttctttttcaattaaattatacaatccccttaaatgctagtggtgctcaatatcatggtatgcatatggaaggatatctacatttgctactggttgcttgcatcgcacaaaaaaaaattcacatcctagaatgaagagatcactggggtctggaaccaacagtttcctggctggtgtgcatttgccctggcaaagccctggagtggccctggttggggacccctgctcttgagccaccccagaactgctgtagggaggacaggctgctccagtcaccactccctcagtcagcagcccttcaaggtctgaagccctggagtctttctagcattttcttatcaataaagcctcgcttcctaaattagagctgtgctcccatttatacttcttgctatatgggatactggcttctaaaagctaataaaaattcagcagaaaatgtaagttaatgaagttaaaataaatctttagagcatccataacaatattcaacaagtagactcttcaataaaagaaatcagctggttgaaaaaaagaactttcattattttttcacaaaatatcatcttctttccagctcaaaggaagtgagataacaaagtgtatgtatgttatagttgccaattgtggcgtctcatatttttctacagtatttttagaatcatcttttttcccatcaaggacatatctataagtatctaaccaatctaattatgaagctgattcaagaatagacaacagttttctttcaagcacttgtggacttttgttaaaagtacatacaaaaagtaaactaagcaggcactgtattgctgaatgatgtctggctctattctgctccacctgcaaacctttttaggctgagtcctttattgctggaaagttatgatttcaccattgcactgtgttcatcaaaagtgttctctcatttcaggagatcagaaatggtgttaccaaaaggggtgagaccctcagctggctgaaatccaggctgaaagttttgacagaagtttcttctgagaatgaagcccaaaagcagggagatgagctggcaaaattatccagctctttcaaggctcttgtgacgctgctgtcagaggtacagcatttactcacactctaaacagacagttctgagtgaggcatctggaaggttctttttcttctggttgtagtttagcaagtaattttataaagaaaccatagttgaaacagaattgttgttatgctttttttgtatgaagcttgttgggaaagatgaagaggatgtttgatgtatggtctgtgccattattggaaatgttagttcaggttcatgacctatatctgaaatataaaacttgtcaaatccactgtttttactcttataaaaagcattgttattttatggtcagcttaagataaatcatggaggctaagaataaggcttagggtcaaagaaatccaggattagagtttaaatgtgataccctacctcctaggtaaccttcaacttacataacatctaggtcttgatttccttatttataacacagggttaaaaatactcactctaaaaagaagtatcatgaattaaatgcagtaatgtatgttaagcacatagtgtagttcctgaaacagagtaaatgctcaatagctggttcttagtaataataaaatattcagtgtttaatcagcaggccagtgaaattctcttcctagtgctttgatatgcattttaatgtttttctatattcctttatagattaaaatatacaaacgcatctacttcatttccagtagggccacttccaccatcagcaaaaatatttttactgaccaggtttttatataaatctaagtttgtgctttggaagataatgtaagaacgtaaagtagaatagatatttaccagtatttcttgaaatcatttaagtagaaacttgcatggaaaaatggcctaatggattacaagaaaatgaccacaaagctctgtttctgaaaatctgaaattctccacagagatttctcatctaacaattcatctgttaaccttcatgtttttaatccatttaaatctgcttgagactctagtgctgaatttacataagccaaaaatactctgaactgcttacgattttagttttatgtgagaatttttatatataaattagagtttccctatgagtttttgacaaattgaaaatagttctatgattaatcaaattttggaacataacctatttcaatcctttgattatccatctttcaaagcaacggccacatttagccagttgcctgttttgctctttccttccctcttttggtgacaggaaaagcaaaaacaacattctaaaaagttagtgtacatgaaggtgatctttgagccaagatcaaacaaatacttgtcgttattcacagacaagcttgtaatatattttgtctcaccaaaaaaaaaaaaaaaaaaaattgactgtctttaaagttagaagtcagtagtttccctaacatttaccaaggccatttgctttatcttccaagtactgtcatgattttgccccaggacttatagtaagaatctctctctaatgaatgttcatacagacattaattttttacacactcatctgccttaaacttctgcataatttatattaatacccttttccactacttgatcacttacttagtgaaagcagaaagagaggaaaggagaaaaacacattttgtttacagatagatttgtatgaagagatggatgtggcacattcagcccctttctttgataataattcatttagtatttaaattaatgttgaacacaatgtgtttgcaattgtccagtgtaagaaaaaaaaagactgtgggtggatgcacaagatacagtgaagagtcattatttcaatagatttgctctgatttatattgaaattgggagtttgtggttttcgtaaggtctcattgctgcttgtttggagaacagattgctctccttggaaaaacttagatcagaagagagtcaaagaaaaaagataggataaaagaagaagaaactggaaggcttctgtggaaaacaaatgacaacatgtaaaaaggaggatcttagtgaagataaaggataggcttcgaaaacaaaggatgttggtaaaactgaaatagaggaagcagaaattagacaagaaaattcaaaatttagggaaatgataaggaagagaatccattagatgactacaaaattgtaaattatatttatttttatgtaggaatattggaagcacatttataacaaatactcttttattctctttttcaactctacaaatgttttcctatttgttttaaataatacggactcactttcttgtaaggcacttttataattaggttttagtcacgcaattataatgaaagagacctaaaaggcaatatatatatatataatatatgcagttttgttatccttccttgattaccaggttgaatgggtttttaatatgccccagagcaccatatcgaataaaacctgcaagccccataaatgattatgaaatttaatgataatggaataaggctgagtaatatgagaaagaataaaagttaaagatctgtgtttatatgtcaagtggttgaggtagactttgtgcacagtcctaaaatatgtaagattacatgatcttcaacaggggggttttgatcgaagagtacaaacattaagttctaagatgaaaaagttctggtggtgactgcagttaatattacctattgtatacttgaaacttgctacgagagtggaccttaagtgttctcacaaaaaaacaaaaggagaaatatgtgagatgacaggctaattagcctgatgtggagaatcatttcacagtcacgtagtacaccttaaatatgtacaatgtttatttgtcaatcataccttaccaaaaaaattatacaaacttcaacaagtagcatatgatttacgtgtttttttttttcatgaaaatataggttgaaaagatgctaagcaattttggggactgtgtccagtacaaagaaatagtcaaaaattctctcgaagaattaatttctggctctaaagaagtccaggaacaagctgagaagatcttggatactgaaaatctgtttgaagcacagcagttacttcttcatcaccaggtaaaaatgcctctttcttccaacaagattatgtaaagttgatttgctactgaaagaaccagagagataaagaatacaaccactggcttgagagagtgggtgagggggcatgggaaggaagagttgaatggctaaaagaatttggcgcttctgggttttgctttctctgttaaatattaaacatttcaggatattctgcaacataaatttccagaccgagtgacttgatgacatcaaaaagttcaaggaatactgtggagagaaaattgatttagctatgaaaaactgcacaaaacgtgctagattctccttttcaaaacagatggaaaggcatagatggaccaattgcttcctatttgagatcactgttcttttgtcattatattaaaatctttctcttcaacttacaacgctgaacacactttagtttgagaaatgatgacttacttgaagtactagaccttcctggagtgtacactcttataaagattagaactagaaataaagaaattctggtatatatactgataagaagctattttaatcaacttaatttctgatagtctggtagtgcacattacaaatgtttgcataaaaggaatatataccttgttaaacgcaatataaatggaaatttgattcaaataaaatattttaatgaaaaattctagctaacctgatacacagtagcaaaatggtagctaatttatataatatgtttgtgtgtgtattatatacatatatattctgtaatatataaaaatggaagttgcattaaaagtatgtttaaaatcccagccttcaggatttctagatttacttaataattataaaaaggctgagtataggccgggcacggtggctcacgcctgtaatcccagcactttgggaggccgaggcgggcgcatcacgaggtcagcagatcgagaccatcctggctaacgtggtgaaaccccgtctctactaaatatacaaaaaattagccgagcgtggtggtgggcgcctgtggtcccagctactcaggaggctgaggcaggagaatggcatgaacccgggagacggagcttgcaatgagccgagattgccccactgcactccagcctgggcgacagagcaagactctgtctaaaaaatggctgagtataaaaaattaatatttggtgttacattgttctcaatcattgtgaaatggttttttgggtttccatttactttaggtccaataaatttaagattatagatatttatgttaatattttaaaatgcttaggccaggtactttttatatgggtgcatttactttgtgaaaatttataagctgcatatctgagatttatgtactattctatttgaagattatacttcaataaaaagtttactttaagacaatttccccccacaaaatctcagcaaattaaccattccgaatatacttaggaaataaatatttattcatttatttttggagacagtgtctcactctgccacacaggctggagtgtagtggcacaatcatagttcactgcagcctcgaactcctgggttcaagtgaccctcccacctcagccttccgagtagctgggaccacaggcatgtaccaccacacttggctaattttttaatatttttgtagaaacagggtcttgctatgttgcccagactgttccaagcttttggccccaaacagtcctctagctttggcctcccaaaatgctaggattacaggtgtgagccactgcaccgcccctggccataaatctcttaatatttgcattttaataaaataaataatttttaaaaattggagttgggactttgtgtttttaagcagaaaataattatttaagaagaatcatgtcagatgaattgttttgccagactcttcctagagtattgcacaaaatgctaaatattctccaaatttgcacacaaaacacgaaagccaaattatttatgttgtttaccattaaaaacatacaatatttataaataatgttcatctttgactaatatagcaaccgactaccatttcaactgttaatcttagctttaaaatacatttcgggcccacctttctgtacttctgttaagcgtgggtgttgatgtccctacttagctgtttagagagcacaatttatatccatctgttgaataaatgcttctagcaaaagacaaagcggatctcagcaaagaagagagatgtgcagcagcagatcgcgcaggcgcagcagggagaaggggggctgcctgaccgaggccacgaggagctgcggaagctggagagcacactggatggcctggagcgcagccgggagaggcaggaacgccgcatccaggtaggagccggaagttaggggccatttaaacagaggctgggcagtgttcacttccggttgtgcctcataacaccaaggcgaacctttgttaccgcctctgatgtttcagccctgtgttaaattctgtacatgaaccatcttttaatcatcacatcagccttagagatggatattggaagttgcacattttgcaagtgtggatgcttaagaagaaagagtttgaggactaggtgctgtatcacacagcactgatcaataataaagccaggatttcatccacacttttctgaatccagaaatttgatcatgccatttcacttttccaggaagccatgcagccacacatttatgccacctttatgctttattgggatgttgacacattacctttaaaaatgtttctgagtttttgccaactgcttaatgctctctcttcatctccttgtccctctccctaccttcttctgtgcttcctttcttgtttgagacagattgagaggccttttttatttttttgtcacttatctacattttaagtaatatctttacatttctaagactttacaaattataaaaaactcagaaatcatctgagtccatgtgtcctctctttttgtagatgaaaacattaacatagagaaaagaaattcttacagaagatactagaatcatctctattcattgtgactgtgtgaaatttgaaatgagaattcgctgaaagttgacagttttgcaaacgaatgaaaatatgatagtattgtgtgacatttgtaacccatttgttgtttattttttcaaatttaggtcacattaagaaaatgggagcgatttgaaacaaacaaagaaacagtagtaagatacctttttcaaacaggttccagtcatgaacgcttcttgagttttagcagtttggaaagtttatcttcagaactggaacaaacaaaggtatattatggctccttggtacccaatattcagaaaaaacaaagcaaaacaaacaaaatgatttctcctccattattactattaattgttattgttaatttaatcaatacttactatttattgatgacccattctttcaacatattggagaatgaaaacataagtaggattaaacatcaagaagtaaaacaaagatttttatcaaattggaaaatggttagttccctaatagatgtgtatagagtttttaaaatctggaggcaggccgcgcgctgtgactcaactcctgtaatcccagcattttgggagactgaggagggcagatcatgaggtcaagagattgaaaccatcctgaccaacatggtgaaaccccatctctactaaaaatacaaaaatcagctggccatggtgacacacacctgtagtcccagctactcgggaggctgaggcaggagaatcgcttgaacccgggaggcagaggttgcagtgagccgagatggcaccactgcactccagcctggcaagagagtgagactccatctcaaaaaaaaaaaaaaaaaaaaaatctggaggcaataatattttttaactgaaccttaaaggtcagtaaaacttagtagagtttggagcaaaatacagacattctttggaaggtggaatggcatagagcatacaagtgttctgaataggaattctgtgttgtaaaatagaacaatgggaaatgaatttgtaaaggaaatttggcccatatttcagagtcttgaagacctaaagcattactttctaggcaacatggagccagacttgttgaaggcttaaaaggaaaagccacacgatcagagctgggctttggatgaatttttaggcaggtgtagaaaagtgactgaaagtgtgaaagactggggtcatgggatccatttaagttattgcatatgggcatatgggagttaatatgggcataaataagggcggtggggtggcaggtgttacacagaaacagatacaaaagatgtggagttcacaggaagatagggaaactaaccagacagagtgagtgacgaaaatgttgatacctgaggttttgagtctgacggagacaatggaagtgagatgggggatgtgaacgagaagttgttcatgggaaaagatgaccaacttcattttggaggtagcgattttgagactccaatggggcatcaaacagaccgtatttagtaggtgtacttggtgaacccaaccctacaagctcaaacaccttggacactctaagcagaccaaccaatttgtaccaagcattgaagttcctgtggtgcctctttggggtttatagaaagactgaattagtagagaaatgaactaactggtgtcttagaaagaagagccttgtgcccacccttccctagcctttagcaagaaaacctttgtgtttctgttttcttacctgcaaaaggcttcactctctcccatactgctaattttttgtttctcctaaaaactcactgaggattttgaagttttctaagaccacagactctttcaagtctatacgatattcatcagtcatttaaatagaacattattttaatttttaatttaaattatttggccgggtacgatggctcatgcctgtaatcctaaaactttgggaggctgagatgggaggattgcttgaggccacgagttgagaccagcctggtcaatatagcaataccccatctctattttaaaaaataaataaattatttcgtgtattaaaaacgtatcaggtgccttttataaatacaaagatgtttattgggttaatttcctaaatgtttctgaccacgttccagccagagtttctgaccccctatgattccatttgcactaattcctttggatcagtttaagtacctgtagattgaaacaaatggaatcttttgagtcttgttattcaaattctcctttgtccatggtcttctatgctttgggattgatgtaataatatgaggtgacatttatcaaacacatataatatgccgaattaattatttgatgtttatcatcgcctttaatcctcaaaacagtcctaagaaataggtatcattatcaatcgtgttatatgaggaaggacacataaggcacaaagttggtgatgaactcactcaagatctgcggatcactaaatagtgaggttgggatttcaatccaaaaggtccttttccagagcccacatctttagtcactacgttattttttcattcaaaaaacagagccattttactaattgcctatgctcactgccaatctagaatcattgttctcctgtagttctttgctcattttgctttgttattacaaacctttattcaagttgatagcccttgagtagttgtgctaaggaatggttatgctaagggacttgagtgtcctctgtgtactggtgtgtgtgatagagggttcatagcaatgtcatgtttaatcttgaaaataagatatggctttagtgatgaagaaaggaaaattcagagagatgtggccaaaggtcactcagctaatgaaggttggagcctaggtttcatcccagatcaatctaatgtgagtcaatttttacctgatgcatcctgctgcctgccactcatatgttttctaagaagttagagataaggccttacaatgttattctgtttttgtttaattttgtttttttatcaccatcattctgctctttcgatttctctgcattatgctttttccatacatagctcacataaaaagctctaaaattgaatgtatataagcattttcaaacattactttttccatgtttttcctgggttctgagaaacactagcagaaaaaaataaaacactttatttttcacttctgattatattcatgggattctaagagatcatgtggtgatttgtaatctccacaattgaatctaccatgactgtcagatatagtaacagtgggtgcttttatccaaagaatttaatgttgtgacattagcaactaccatattttagtgtactataaatctctatgccataaggaagctgtacttattcatttttattctcttaaattgcaacgtagttctctgaagtaacattgattttttcttcttcttttttgagacagagtctcactctgtcacctaggctggagtgcagtggcacaatcttggccaacactgatatttgttggccgaactcgtgatatttctatgagaacattaagtcttttaaacatgaagatataatagtattatttagtaactctatcttatatggtactatgttctaggagatgctcttactgaaaagctgactttggaaaaatacttatatttctacattattcatttaggagaagggagttgatcaaaatttaaacctcctgtgagattctcttacatgagaagaagtgagataccaagtacattttcttcacttaggttattactgggtttaccttttctaattcagcattcaatataattacttgacaaaattcaggtaacatctaatatttaccagccacatacatactaaatcaacttttcaattaaaatagttgaaaataagtattttcaactattttaaaatatttaaaataagtatattggcttaataaatcattttgtcctcaagtttgtatgagagacataaaaaacaataatcagtatctccaagagtgttaggcactttaaaagtaagattgctaatagaatgctaacagtaaccttctaagaaaagcattatcatctgcattttacatgaaagagcctgaaaataattcaccaaagtcaaacaactagtgatcctggattctagcccaggcttgactggttcaaaacttatattctctttccatcatgtgatacatgtgtatgtaataaataagatttaacagcactaagattagattatagctcttttcagagaactagttaacaaaatggcttgattacttctctctctcttttttttttgagacaaattcttgctctgttgcctgggctggaatgtagtggcgccattatgcctgctcactgcagcctctatctcctctcacctcagcctcctgagtagccaggactacaggcatgcaccatcatgcctggtcacttttttttttttccctagagatggaggtcttcccattttgccaaggctagtctcaaactcctggcctcaagtgatcctcctgcctcagcctcccaaaatgctggagttaaaggcatgagccgtcatgcctggccaaagatcattgatagtctcttttgactaagatattacattaaataaataaatgtttctattcattggcctagaaatctattatgtctatgatcaatcactattgattttgtgaactggcctgtaataagtaagcatatttgtgaataaattaattattataatggatctaagaattctaaacaatgagacaaaaccaggaaacaaaggagaaacaatttttgtgagtattattggaaaactatgaaggcaaatagctggttgtgtatagaaaattaaaaagttagccaggcatggtggcacctgcctgtgatcccagcattttgggaggtcaagactggaggatcacttgagcccaggagttcaagatcagcttgggcaacatagtgagacctcatctctacaaaaatcagaaaattagccagatgtggtagtgcctgcctgtggtcccagctactcaggaggttgaggtaggaaaatcatataaacccaggagttggaagctgcagtgagccatgattgcaccactgcattccagcatgggcaaaagagcaagaccctatctcaaaaaaaaagaaataaaataaaaaactgttagcaaagtgtctattttggccatatggaaataagtcagatttattgttaagaacaatgtaagatccatacatgtatgactctatgtcttcatccacccatctgttctgtatgcaatatgtgcactttatttgagggcagagataaataatataaagtgcctacctaatgatcataatattttttctaggagttttctaaacggacagaaagtattgcagtccaggctgagaaccttgtaaaggaagcttcagagataccgcttgggccccaaaataagcagctgcttcaacagcaggccaagtcaatcaaagaacaagtcaaaaaattagaagacacgcttgaagaagagtatgtgattgacaagtcctaaactttcttctctgagataaagtttcatacaatctttcctgtaccttgtattcaaaacactcttttaaaatctcaaagtgtctgtgtatttcagcatgttttgaggaaacaactcacagttcaaaagaaagtatcgctaatacagaaaccaatatctataacagagcccaaaaaatataaaggatgtgggttttgcatcttaaactgatcatgttcatgagaaagccatatctattctattctgtggcctttgtacattgtagagggaatcttgaaaaagaactaatatttaaaataatttttttactatattattctgctgtcaccatttagagcgaaaaggagatattttgttagtgtagattccaggcctaaatacacatcacatagaccatatatctccaacctgaagaagctcctggagcttgtttacagtgcctcggtattcaagttatcctgactaatatgctctttccagaaattaactttaaaatattttatttttaaacttttaatgtttgtttatctgaaaaaaaaaaactgcttggcctattgatatcctgttatatacccaaaatatacaaaaaagtttggaggggaaaaacatatgaggatacagccaatattattcaaaacaatatggctaaacatttctatttttaacataatttagtggcaaatcaatgatacataatagcatattattattaagggacaggccatcatttctaaggtgggttttaaaatgtaaaatgtgtttttaatactattaacagcttaaaattaacattttacatttgcctaaactttaaaatttgatacatattttatttaaaacaaattatgacttgaaattttgaggactttatattacattaaatattctctatcaagttatggaaatagtaaaacagagtttattagaaaggaatttacttctattaagaatagccattttaacctttatttaatttaaaaagttgcaatataacacagcttgcattacctgtactgctgacagcattaggcacattcagggtataaatttgagactgcaatattatttaatttgacagtcaatgatgccactctatttttcttgatgtcttcaagtgccttttggtaaacagggacattctttcactttttttttttttaacccaaggacttactagttcaattatatactgttagtttcttagtctttttctaaactgaaagccatagtcacctggttatacatgcatagctaatacaaattagaaatctatagttgaaattctgttcactagatttgttacaaataaaacctataagttgtctaaaagtagttagggtgctcatgtacaataatttataaatgtcttttggaatcaggaccataagacatttatgaaaatggctgaagtcacaaagattatacatcgcaggattagctctaataatagaaacagttcttgcccggcagcatgggattgagatcacgagctctgtcttgattgataagatgcagtttataaaggtatttctatagaaagcatcactgcagtgtctctcctttaagtgtaagaagaacatttctttggaaataggactattgaaaagctgtgtacactgaaatcttttctggcatagtttataaaaataagtcctggcaacaactggtcacatgcagagtttaattagattctacctggattcaaacccctttggacccagcaatgttttgttcaaagtgcagtttcactcaaagtgtagatactgcctcattaaatgttcattctcagagaagataggaaaacctgataaactactcagaacaactgtgcaattttttttttagcgtgaatagtttcaactttgaaatggtcacaaatgtcttcattatctcttcacctggtgatttcaaggaaaatgtgttgttgttctctattaaaatactgagttttatttacttaatttggttaattttagtattaaaaccatggaaatggtgaaaaccaagtgggatcattttggcagtaattttgagactctgtccgtctggataactgagaaagaaaaagaactcaatgccttggaaacttcgtcatctgccatggacatgcaaatcagccaaattaaggtgacctgctcacacattatatttataatccatgtctagcttttaagaactactttcttacatttcatcaaatgctgttcggtcccaggacaagactttcattgcaatgtgactattaaaattaaattcatacattttatcaagctaagaggtctggattaatactgggcaacatttatagttggaattatgtattcacattgtctgacttgtgcattcaaagttaatattgtgtgaaatatcattaaaatatttttatggttacattaattcttttccttgattttgaattaacctcaatagaatgctctgccggttcattatacaacatgaaatgtattcatcctgtacaactctaaaatcccattcccaatgtctagttcaagtattagtggtacttacccacaccaatcacaaggaggagtttgaaaagcatctttcttaagtgaagcagttctactccatggttatgatgttttcatttatgaccttggagcatggacagaggtcctctgattccttacctctcccagctctaaaatgaccaggtggatagactatcattggccacttcattcagacagttcaagaagaaaaatgggcttacaggggcttggagtgtttatttctctttcttttatacaattttataccacacattttcaaaattcagccactttttctacctcagctttttttttttttggaatgggaaaaccctctgctatttcattcaattaaatatagtaaaataaataccaaggtgagggaacatttcacactgtggctcagaacaagtcgttaccatgtggagggtgggagggtgcaatgttgctcagataagattacccgctgtgcagatcatccttgcttctcacacatcttttgcaatcaagcatacatggagtttcatatacacagtctgctatgtcttctttggtataccaggaaaaatagatgtgaggccatggaagaatattcattaaatatttttaattgttaaaattgtttttaaaagttgtcatttaatcattttcactaaattctaagaaaaaagaatagcacatttaaatagttttgtctcaaaaatgtccccttttgaaaattaacacacatttttcaacgtatttattttttctataattcatttactattatttccacccttattccagagcttctggaatatatcaactatctaatgtcatctcattgttattctccagaaaaaaagattacatgttttcttaaaatatatattcaattgtctatttttattttatcaggctagaaatacatttcaatacgtccaataaggcatttttaaaactatctaaaatatgtaagtgaatatgaataccaggaaaaagatatttgctagaaataagcaaagttacagtggaatacactgtcctatggaaattggtctattaggttcatgttttatttccaaacataagactacattataggaaaggtttaaaatatagtaacacttgtaatatttttcctttaaaacgatcttaggattaaaagtaatgaagcatttgccttgttggaagataaatacactaagcccacttttgttcattattacatgccatttcaaatgactgagttcttattcctaacttataattgataaatgataagaacatatgctgggttcgtcttccatcttcttctcctggatggatttatttttaccacaatccaacaatatgattgagtgattcgtatatatgaatttgttgatggcaagtattactctaataactaagagctcggttcttaactaagtttgtttcaccgatgtgttacaagcaactagaacaattattagtgctttgtagacaacctatattttttgaatttatgattaatttttctaaaaaatataatcttaaaaaacagcaaaacaaaggaagcctgtataaatgctcaaataacaaatattgatgagatataccacttcattcattcatatgaaaaataaaaatgatgcatatccgacatttatgtaaattatttctgattgcctcaactaggcagaaattatttctgactatggtgtctcatctagacagaagtcaaaactttatttttttcctagggcaatagtattttccatttaaataatctgaaacagagacttggctgaatttttgatgtattttgattaaataatttggccctttttctcagagaaataattttcatcttcttatatacaaacaagcttctatgtttgtgagagacactccacagacacacataaacacatgtgcacatgcacacacttccttaatagttatcagtatttttcagatgttggttaacatgtaaaatgtcctttcttcccccagttgaaataaattgaaatgacagtatgtgggcttttctctgtcaagtacatagcaatgaggtccctggatcagcagcctcagcatcagctggagatttgttagaaatgaaaattcttgagccccaccttagacttagtaagtctgaatcccggagaatagggaccagatggtcctagtgcattctagctttggaaaccactggcatcaagaatagatgataagtttgaaaaaggaaaactacttttaggtagttgtgcagttattaaaccttttagtaacatataaaatactcaactgaattttagaaaaataagtgaatgtcagtatttagcattctaatgagttactgaaacacaatgcttccccagctcagttaattaaaacgcctaattcataacgtaaacataattctctgtaccttcagagatactgtaagtgtcccagggacatctccttgcttacttcactgcaagcaagagtagctatttctccgtatgctctatccagcaagcaccccccaacccatcactgtattttgcagacattttcggcatatctcatctccccaaacacatggtgtttgctcacagctgcgctctaaccatccaagtcttcaaatatcagttaagaaaatattccctctttgcagataattgtatcatttcaggaaggcaagcttgctcagcctacattgtcatttttcttgttttaactattaggtcacaattcaggaaatagaaagtaagctcagcagcattgtaggattagaagaagaagcccagtcttttgctcagtttgttaccactggagaatctgctcgaattaaagccaagttgacacaaataagaagatacggggaagagcttcgagagcatgcacagtgtctggaaggaacaatcctgggacatttatctcagcagcaaaagtttgaagagaaccttagaaaggtaagaattgatccacctatacttaagtttacatatttcacattgtatttgtgggtaaatgcaataaatactttacaaatagtggaataagagaaagacataatttgtgaaataatgggacatgttgattttagatgtttaaagaatgcattttataattacattaaaagttatccataaaaggtaggtatgccattttctcagtaacttttttttttgtcttgctatgtatctttcccactgttatttttatattgcaccaatgttttagatccagcaatctgtgtctgaatttgaagataaacttgctgttccaattaaaatatgttcttcagctacagaaacatacaaagttcttcaagaacatatggtaagagtatgcttcaacatttctactatttaccaacttaaaatttgataattcccacttgaaaagaaaatacagtaaactttttaagagaattgaaattggaaaaatgtttatattagttgagtaattatatagatctaatgtattcactttatataatccaagacatgtaaggatgtgaataaattttcattaaagatgtatattaaaggagtattcatttcaaatatatttctctcttttaattaggatgagtaacatttttagagcttagctttaacaaccctgttacctcttgccagcattataaaaaagtacatgtgcaaggaaaaatatatgtgtatagctgtcttcatattttaacccactgtactcagatgtttaaggaatatatcctcactgatctgtttccaatgattggtttttctcatcattgcgaatcttctgcaaggctacagacagatggctctggcagaatttagggggaggaacaaagggggataattacgtacaaagaaatactaccgtacattaattaataaacaaaaatacaaatatgattcatattgcatgttcatgtgtgcacgaacatttataaaggtgtatgtaatagaaaacaagccattgacaaaggccatctggaagagggagtgagatttctattgtttaaatattgataatgagaatacacttttgcgttacttatttgtaatttcttaatacaaaaaatgaggaaaagtaggagaattcagtgtgatgaaattatttttatagacaactaagttaataatggaggaccaaagaggctaatattctacttttccgatatttagatttcctaaagcaagttgtttttctgtgtcttgatttcctaatctgtaaaatgaaggtaatgaaataacatacctcttagggttctcaggaagatgaaaagagtcaatacatgggaagcaggtaatgcagggcctgccacattctgaggcactgtgtcattattattattattattattattattattattattactattgagatagacagtagcttcttcagccataattctttttatatgtattttttggagtgattatagcatgttacatgtgggttttgtaagttaagaatagggtttttaaatacgtatttagcataaaatgactaataatcttcacaagttacctaaattgttaagggaaagttgaaagtttttagataaatagcagtgcattcttatttgaagaagtgtctccattttcgtttttgatttctgtatttatgaagtcactttcttctcattttcactatgtcttgctgcaaatcatgggcacagaccttttaaaatagatataactcttatttgtttttgggggtgcacatgtgataatttaatatattcatataatttgtaaaagtaaaatcagtggaattgggaccttcatcacctaaaatatttgtgttttatttattcaagaaacattcaaactattttctagctattttgaaatataggatagattattgtaacctatagtccccctactaatctattgaacactaagtctcatttcttctatcaaactgtatatttgtacccattcttagtgctattcctgtttattatgactgagggaaaatattttgcgatgatcggtgtcaaagaaaaatgcaggcctcgttggctcctgtgctttcactgcattcttctcgcactcttcttaggatctctgccaggccctggagtcactgagcagcgcgatcactgccttctcagccagtgccaggaaggttgtgaacagagattcctgtgttcaggaggctgcggctctacagcagcaatacgaggacatcctaaggagggcgaaggagagacagacggcgctggagaatctgctggcccactggcagaggtgagcagcacttttccttgagttgctgcactactaaataggaaattctggattagcagttcttaaagtgatggggagtagttatcccagatgcaaaagacgtgaacttgtgggtctactgtaggaaactcttgatctttgttataaggcaaagattcctgagagtggagaggatatatatgggtctttacatattatccaatataaatgtgagtgcagggacacaaatgaaaataaaaggagggatttttgtgctggcatatctaagactgagataactgaggctgtatttactatggtttgtgttggaccctccaacttcacaaaggtttaatctgctagcatgataattttcaataaatttgtttctgctctctgcttcctttaggctagagaaagaactatcatcctttttgacctggttagagcggggtgaagctaaagccagttccccagaaatggacatttctgcagacagagtcaaagtggaaggtgaacttcagttaatacaggcaagttcaaggaagtgtgaggaaggaaaaaataaaatgctttttgttacagttacattatttaaaataataaaataaataaacttgtacctcccttcttgctttggttttgtgattcctgaagcatcatttgacatcagggtgttccaaaaagaagaaagcaaccatgacctgaaagggagagaaactaacaatgagaactttgtgatgatcaatttccatgatgtgttagaaaatcctgtaatgtaatgcccggcatctgaataacatggtttggcaaaggagttgaggaaaggatgggtaggaatatagatgaaagaggttggctatcagttcataatttctgaggctggaaataggtataatctctctacttttgtaattatatgacgtttgggcaataaagggtgttcttttaaagaaataagtaatagaatgtagaaagaagtcacagtaatgattattcttatggaagacagaaaaaaatgaatgagcacaaatgtaggtaataggtagaaagacaaagtttatttcatacttgaagaagccaattttttaaacttaaagaaagaaaatcgttgagtataattgaagctaaaggcaatgttactgatttctagagattaataacttgccttaaatgatactgtctatgctggaaaattcaacagtcaaaattgcttctcaaaaaagatttattgtattacagatttatactccaactttctcccatcaacttttataagacgtttaagaggaagctacgttcttttgccttttgtaatcgcttctctgaaaactctgtcaccagtgtctatagcatcggaatctgtggccccacctttaaatgttctccttccttgacttggggggtactccattcttctggttctcctgcctttctggtttattaaacactggtgtctgcactcatcttccacaaagtcccttctcagaaacctgtagtgactgtttcccgccctgaccataaagggcaatcctgatctacaatctggttcctgtcttcttgcaaatacatgtggggtattcccagaggggagggacttcacagctcttttccttataaatgaagacactgactcaaggctacatgggcatgtaaaactgttgctgcccatctccacgtggaaactaagtgccatatgactgagaggactgcagactctgttactcctgcatcctgacattgcgtcagtaaggcagcctcgcctcgtgggctggacctgacttgtgcattcctacctcctggctctgcaccctgcgctgtttctttcccttgtacccagcataagtcgcagttctgctttatgatctcacctgtcatccacaggctgtgtattccttcctctaatccctttagcaatcttgcttgtatcacctatgtggcctcactaggaagggaaggagagcattttgacaagtatctactatctgctgtgccatacctatcatttcacttaatatttttttattattattacctatctattggagtgtttatattttatcttttgttaggtaggagccacaacttttatgcacctcacagcacttaagagattcgttgactgattacatttttaaaatgaaggagttctgttgcttaaaagtaaaatgaagagcccttaagttctccagtttggcctaatctagactctaaatagaaaggcagaacatgtcccaggctagaattgcatctctcttattgttagctgtgcactgagtctctccggcaatagtttttctttgattctctttgcctactcagtctcttcatcgtgaaagaaattctacagcttctagatttgcctaacttagaactcagactccagaaaacttattcaggttttagtcgcattttattacttgatttagaaatggatccacttaacctttaatggaatggaaccaaattcccctaaaggttaagtggatgaaccaaattcctttaaaaggttaagtggatccatttctaaatcaagtaataaaaactctcttcagcctgtcccgaatgacttgcattttgcaagaatgcgaatcctttggacaacagccgcctgtgccgcatggtccttacttttcagtcctgttaggatgagatccgtaatgtcttgtatttttcaggcactgcaaaatgaagttgtatcccaggcctcattctatagcaaacttttgcaattgaaggaatcattgttctcagtagcctccaaagatgatgtgaaaatgatgaaactacatttggagcagttggatgagagatggagagatttaccacagatcattaacaaaaggttggttctaaaagataaatcttctaatattgttcatttgtttttaaatgatgagcatataaattaagaaagcatagttttgtttacttttatttaactcaactactcacctgataactacagaagggaagaaaacttttattttgaaaatcaaggtccacaaaactgagcatttctgatgaatcccaatacaaaatttagtcttaaaataagggcaagttattaaaccagttgaaatagattaaagacggtaggattgctaatgtatgtattatttattgcttaagctgtttttgtataggaaaaaaatggtacctaaaattttatctcacatgacatttctcaaccagaggcattttatacacatatgctagtccatttcattttaatatagatcttctggagagagcaagggagattattgataaatggaggcaaaaatggattaaatcttaattaactaggtgattaacaattggcatctatacctttccaatataccagaaaacaaattttctctttaaattggtattgatcacccatgtgatcttaggcatttaacctttctgaccatttaaaaaattaattcattcagcaaatatttattgactttccacaatgagtagcatactcttctatgtgctggaaatagcagcaataaagagtttcatcctttgctttcatggagcttatatttattctattatttatttattcctgtattcaatcaatcaacaaatatatatcaggtgcctgctgagtacaaggtaccatatcagacaccaaaagccataaaaatgaacaaaacctaaccccaaataattgacagattagtgtgggaataatgaggggtgaacacgaagtattataggatcaaaaaaagggacatttgaatggtttcagaaatttacggaaagatttgatgccacctcttgaaaggtgagcaattttctgtaaaacaaagcagtagctgccctttgcctatcccttagagggaaagtaagggacttttaaagtgataccaatgtgtgaaggcattgaaaatataatgtatgcatataaggataatgtgtagaagattttataagtattaaaatgtgaaagctgatttaacagttgaactttggatacaaaccattttaataaatactagttttgattaagggattatttttaatatgtttggattctgatctccaatcacctattatttattaactaattcattgattggtccctgatgatatcccaggcacctttttaggtgccgaggatacagcagtaagcaaggcaggtccatggtgtggagagaggggaggaaggaactgggcggaaaataaatacataactaagcaagtgaacaaacaagacgatttcaggcagtgttcagtattatgaagacaacaaaacagggtagcatggcagggactgcaggatggtgtatctttagaatggtggtcaagcgagacctctctggggagatgacatcagattaagatctgtgggctgtgcaggaaacagacccacacaggcaaagggagcaaaaatggcaaaagctctaaggcagtaatgagttggttttattgggagacagagaggaagtcagtgggaatatggggcagagctgtgtcagatgagaccagagaagtagatgatgtgaggtttcttgtagaccacagtaaggagtttggggttctgccttcttaagtgcaatgggaaaccacctagtgtttaaggacagggaatgccctgttcacttgaaatcatgtttacttattatctagagagtatattgtaagtaggcaaaggtgggagggaggaagccagttaggaggctgttgaaggtcaggcaagaactgaagaggtttagaccaggatgagagcagtgcaaatggagagaagagtgcagagtcaatgtatagtgtgtgttggtggggagggaggagtggggggattatagggctgaggcccttggccccctagaggttagaaaatcactgacatgaggcagattaatagaaaaggcatataaatttatttaatgtatatacacaggagccttcaggatggagatccaaactccatacatttgacatacagaatatatgccatattgaggttacagaaagattgtgagctcagaaaatggcccaaaacaggttttcatgttaagacaggttattggagggagaaaggaagaggcttggctagcaaagctggtcttgttatgtagatgaaacctcacaggtatagccctcaaagagaatacatggtaaaggtctttttcaggtctttatggtgtttgactctcagttcatctttcctagatctggacaaaggcagggctagctgcattagtgcagattctctacagatctacagaagcaagtttattccccaaaagacagctttgcagggccatttcagaatttgtcaaagaaatatattttggagtaaaatattttgatttccttcagttcccattttgaaacttaaaaaacatttcacgtattaatgtgaaatgctaaatggaaagttttgaagagatttgtgttaaagtttgtttgatagagattgggtgtgatggctcatgcccataatcccagagttttgggaggccaaggtgaggggattgctcaaggctgggagttcaaaaccagcctgggcaacatagcaagaccccatctttacaataaatttttttcaaaaaagtatccaggcatggtggcatgtacctgtagtctcagctgctcagaaagctgaggcaggaggattgcttgagcccaggagtttgaagttacaaggagctgtgatcacagcactgcactgaagcctgggtaacagagtgatactttgtctcaataaaataaaaagaaaaaaaaaggctatttcatagagatagacaaaggagtggaaaagcaaattaagataaacagaaaaaaagcaaactgaaatatattgttgcatgtcttctttagtcagtctcttagtcctgagaatagatcagttcagttaaatagctgtgtcccattccagaaagtggcattgcaaatgggctgggcctctacatatgatgcaggcaaacagatctttaataagagacatttctaaggaaacagaagaaaaacaaagtttaatatctagagtagtctatagacttgtttttctagagtttgtgaagcatcttcagattgcagtagcaatctgaacagatttttctggattgtagttcagttcagatgaatggtcgagtgaattttctgagaagtcaatacatcaacaggcacataggttgtttacttacaagtttctgttatttctcccaaagtttagttgcctagcttcagtttgtggggcattaaggaaagcagttttggctgagcatggtggctcacacctgtaatcccagcactttgggaggccgaggtgggcagatcacctgaggtcaggagtttgagaccagcctggccaatgtggtgaaactccatctctactaataatacaaaaattagccaggtgtggtggcaggtgcttgtaatcccagctacacaggaggctgaggcaggagaatctcttgaatctgggaggcagagattgcagtgagccaagatcacgccattgcactccagcctgggcaacaagagtgaaactccatctccaaaaaataaataaataaataaataaataaataaataaataaataaataaaataaggaaaatggaaggaagatttggaaaaccttagtttggaaacttgcggccaggaaacaattcaggattcagtccaaattatgggaacataataaaaactcaaaaacaatgaacaaagttagattctagtaacatacatactgtagttttttttaaaacataatttttctctcttcagcccccaatttctaccaaagacaaatcacagtaggatcaacttatttgcaagataaattttagtcttattatacttggcctaattatccatataaagtgcagcaagattagtgattggccatacaggctttttaaaaattggctttgctgctacgtttttcataagaaatctcagattagactttcaaaagtctctcaacattaaccaaacaaaaggtttatctgtgcctgcagataatctgtatgaattgggtgaattcctttcttctaaaggtcctaatataacttgagattcctgggcctgtcagaaagtgacattctttacttaccacaggtcaggaactttataaaggcatcacatagaaaagtataaggccaatcttcccaagggcttttcattggttctataaagtttttctgaattcctcaaagcagtctgatcatatctgaaaatatgccattccagtcaaagccttggtaaaataaccaatgtttccaattgtgtcctgtgacaaaacatattgaacttatacaaataactatattaccatacattaagaatgctcacaaatagtctccaatttctggaaaaatcaagtagagagaaaaaatatactacaaattttgctcacagaagtgtagtttgcccaatttgttgtaagctatagacaattcaaagaaaaaaaagttatcttgactttggaaaggaaaacataaaaagaatcagcaatgtttcaaacaaaacaccactaaaaaaagtatttcaggcctctgttagttcagtcctatgtaattaaatcttgttctgcttaatgttgggttagcaaatctcacgaatgtatttttaattagagtcctggaagttttttcttttgagacagagtctcactctgtcacccaggctggagtgcagtggcatgatctcagctcacaggaacctctacctcctaggttcaagcaattctcatgcctcagcctcctaagtagctgggattacaggtgtgcaccagcacacctggctaatttttgtatttttagtagaaatggagttttgctgtgttggccaggctggtctcaaactcctgacttcaagtgatccagctgccttgtcctctcaaattgttgggattacaggcatgagccactgcacctagccatggaagttttttcttagttcaatagtatagtctccaaagttatcagaaatctgtattttagaatacttgcaagagtcctttccatgaatttccttaaagaaaaagcaaattttggattgcagctgactgtaaaccactttttgagaagaataaaagtaaaataataattgtctatggatgacaaaagtcataggctagccatggttaaagacacgattaaaaactttggttacttctgtggcacacaacaattgaacataatgataattattactgataacatatactaaggcatcagaattacaggaatttcattcaattttggaacatatgttatgctgagagggtatccatagattagatgcactcgtaaagaaaggacaagatgaagagtgcctcataggaccaacagggtgaatggtggcaatgttcactgagacagggaagattgtgagtaaagcagggtttgggaagtaaaaaatatcaagaggtatagagtgttcatgtgtgacaacattgcttttgcccttgggtaagcttaattcccaaaatacatcattaatcctttctgtttacttatgggacattttaactttaatactttgtctacataggattaattttcttcagtctgtggttgctgaacaccagcaatttgatgagctgctgctttccttttctgtctggattaaactgtttctcagtgaattacaaactacctctgagattagcataatggaccatcaagtagcccttactcggcataaggtaaagtggtttttttttttttaagattgaagaagaatttcttcataaaaaagttcttgaattaaaaagagatgcaacattttaaaaaagtttaaatggtgagaatttaactttttatttatatgaaaatgttttaataattgagcatatgagttaaggcaatgaattatgcagaccaattaagcagataaagccacttcagataaaattggcaaccatcttaagacactttctcttcatagtggagcaaatgattgctaggataaagtgataagaatgtccatttttaagcttcccagtttgttttatttcaaaactgaaaactaatactgaattcaaatactttaaggatatagtttttctgaattactattcagctttaaaatgatttaaagcttatttcccttatttataaattatgcatatggaggggtgaaaagatctttcctctgctctctgaacgttcaaataatttgagtctatgaaatgaactgacaatagaccaattaacaggagaaatggcaaacacatttattatgtgcatattgtatgggagtcccacaaaatatgagactctaagaataaccagatgactaaagtttttatgttatacagaaagaaataggggctggggcttcaggagggtagtagggacaagctatgggagggtgaggggaggaaatgcactgtgaacaaaggctgtcttattatgcagaaaaagtttctcaggtagcacacctcagaattacagatggcagcctgtgctaacagtctttccaagtgagatgtcagaccttaagggactttcctgtgagttattcctccctggttgatgattatatttcttctggaggaactttccttagtcagataagggagcatcaggaaaagctcttctctgaatttgctgctcctcaggttctctcagtttaaagtccaaagtgacatattttagggtatcattttctgactccccaacacattatatctatcctggcaccagaaaacattcaaaaattccgatattgatcataaagcattgaaataatggagataagctacatagtacgcatatagcaacatttaacaatagaatatttcatatttattgagtgttcactccttgctgggttgactaattggttctgtggcagggaaaagcaactttctcctaccttcaggacaggagatagttttacatcttgggggaaggtgctcagtgaatttaggctctaccatccaaacagactgagagagagcagctatcttccctgatgattacatttcaaagagatggctcccaggtccttcagaaaaatattacggaggtagaaaaaactggccagagctttaagaagagttatatctcaaaggggcagagaataaatttacaattacaagttttctaaagtaaatgctctaagaaaaaagaaaaggtcaggatctgcagtcaagaggaacctatctgaagtttagtagtcaaacagaggaatcttaaagtcattgttgtcaagattaagataggtgataatttctatttaatggaaaccactgagaatgttgccaattttctgctagattttaaacatgatttattgtgagctagtcaaatttcctatacagaagtcttgcataaaatacaactcggatttggaactaatttaatggaaaaagatttcttcatggattttgtggatagaaattgttagttaaaaaaattaaacatttagatttttaaagatttatatgtatacacatatacatcttttaaatttttaaatttaaaattttttcacatacatgcatcttctaaaatttaaaatttttaaagttgaaatattaaaaatatgagatatctaaatacaaatatttgtatataaatgtatacatatatgcatctttaaaatgttaaaattaaaatgtaaaatatatgtaagcatctttaagaatcttccaatgtttttatttcttttaactaacaatttctatccacaaagaaatttttttcacagaattaattacatagttccaaaacagagttgtgtttgtttgtttgtttgtttgtttgtttgagacggagttttacactgtttcccaggctggagtgcagtggtgcaatcttggctcactgcaagctccgcctcccgggttcatgccattctcctgcctcagcctcccgagtagctgggactacaggcgcccaccaccacgcctggataattttttgtactcttagtagagacggggtttcaccgtgttagccaggatggtttcgatctcctgacctcgtgatctgcccgccttggcctcccaaagtgctgggattacaggcgtgagccaccgcgcctggcccagagttgtgttttatttaacaaatgtggatcagcaaaacagaaaattttgtgaattttctaagattcactgtagatgacctttaagtactatactatccatggcacctaaaatagatcttcacatcacaaatcctgtaaaatacctctgccatagactgtagtgtatctcaggaatcaataactctctcttcccttccaggaccacgcagcagaagtagagagcaaaaagggcgaattgcagagtctgcagggtcacttagcaaagttgggttctctgggccgtgctgaggacctccacctcctgcagggaaaggctgaggactgcttccagctgtttgaggaggccagccaggttgtggagaggcggcagcttgccctgtcccatttggcagaattcctccagagccatgcctctctgtccggcattctccgccagctgaggcaaacagtggaagcaaccaacagtatgaataagaacgagtctgatttgatagaaaaggacctcaatgatgctcttcaaaatgctaaagcattagaatctgctgccgtcagtctggatggcattctttccaaagcccaataccatctgaaaatcgggagctctgagcaaaggacttcctgcagagccacggctgatcagctctgtggagaggtagagaggatccagaaccttctgggaaccaagcagagtgaggcagatgctctggcagtgttgaaaaaagcattccaagaccagaaagaggagcttctgaaaagcattgaggacattgaagaaaggactgacaaagagcgattgaaagaacctacccgccaagctcttcagcagaggtaaataggaaactgtcacggccacttgtctcttttcttttgtatttgttctggaattaacttttatgcaaaactttattagtactgttcaaggaaaataaaaactcaggaccccaattcactctgccaaaagaaagaaattaagctgagttgagtcatgcaagcagctgcctttccttttgttcctaaacagatagatacagagaaaagattaaataattccataggtagctactctatgttcaccttgtcttaggtaaagtgctgatttactgagcacgagatgaattcgtaattgactattccctgcctgcttcttttctcttgcaacacatggattaaccttattctgtctctttcccctccagcccatttttcccctttaagtgttgaagccctcaaaatcatctttggagaaaggtataaaccacagactgtttctgtaatttcatatttatttcttccgggcatgtccttaaccttggcaaaatcaacttctaaattgattgagacctgtctcagatactttttggttgatagtaccatatttagcaatttcttcttcctcttcttttttttttttttttttttttttttaccactttgaagataagattaacgactaatttgacacttgagacgtactaaaatttctttggatttccctaaagtcagtttatgagcaaagaatatgtagatcttattatctgtttttaaacaatttttttactgatgggagaagggattcatcttctataacaagaatgaaggcagaagagaaaggtagtgatcctagtagttttggtggtaaaaagtatgaggaaattcctccttggtggctgagagcctcttggtagagactggtgcaagctcattagttcagaggagagggcagatgttggaggaaagaaaatggtgtgaaacagttctcttgtagaggggagcttaggaaggtgatgaactgtcatttgagctctgtgttcatttaaagtgaaaccaatcagcttggcagagtcattttctacaactgcttttaactgtttgcttagaggtatggagaggcagaggagtgggtttaagtaagcaaagctgagcttttgtcaggtgagttcatttgagaagcaaacgggtcaaagataagttcccttagtaaatttgaaaagtaactgttttcttaaaactgtagccttcttttcaattttttttcttcttaatagaaccttctgactcctgttttcagggccacttgctcttccatttttttcagtgggcaaagaaacagctgaaatgcattcatgccaaggtattcataattggtaaagattatgttgttcctgaaagaccattgctggttgtttccttttaaccagaatcaaccattatgtcgaggatttagtcagatgatagtggagtcaatattgggactgggctcctgaggttataccctttataggcaataaattatctgattagtttaagaataaatttacaaaagggaatgatacttgggaagaaaaaatagcctccagaataaagagagaacaaggtgcctagtgtcactcaccctggatgccagcagtatcattggtgctgcagggtgtcatggccttcttagaccaagcagacaggagatcctcaaattgccagagtagaaaacccaggttgagctcaggagccacatcagtacccacaacactgcactcaccaaagtcacacatcgggtgcagaaaatgttgtattgaattaatggacttatttaaattccagccatactaatgcttcactgtgccaccttgggaaaacctcttctcttcttgtaaggtggggataataagaacacctgcccccagccaccatcttttaggaattaaatgggataaagcatgtagactcattgtgtgaactctacagtcctataccaaactgtaagaatgaagagtaaatggctgcctctttgtggccacttttttttttctttgagacagggttgtgctctgtcacccaggctagagtgcagtgttgcaatcatggctcactgcggcctcaaacttttgggctcacatgatcctccagcctcagcctcccaaatagctgagactatacacatgtaccaccacagccagctaaattttttttttaattttttgtagaaatagggtcttgctctgttgcccaggttggtcttgaattcttggtctcaagcagttctcccaccttggcctcccaaaatgctgagattatgggcatgagccactgtggctggtgatatggccactttttataaatgctgagatactaatagattagggacaaaaatgatcatttccttatggtaatcttttcaacaaagtaggtaatttaagtttaaaaaaaaaaagtatatatatatatatatattctgcagagctcagtaaagctaatttgatattgaatgaaacaactgtaatccttaaacactattatttacatggattgaacctcatggcccagaaacatttcttaccaaagattttacaataagtatttacctagttagcctatgagatcagccttagttttgaaaatcttctaccatcaaagcaaagtagaaagaaaatacaaacttaatagaaggttgatggtgagtagtaagaatgactttcaatgttttctgaggtacagtctgagttattttgcaaaattaactttaaaagtactttttccattgataaacattaatttaatttctgtgttaaaagtttttctagctgtctaaatgagtgctttatggactcatcatatacttacggagaagaaatattcatttactacctttagtaaattaataggaaaataacattttaattcacaggttaagagtgtttaatcagctagaagatgaattgaattctcacgagcatgaactatgttggttgaaagacaaagccaagcaaattgcccagaaagatgtagcttttgcacctgaagttgacagggagataaaccgcttagaggtcacctgggatgataccaaaagactaattcatgaaaagtaagtcaaaacccacccagttcttgtttttagcttcccacttattatgtgacattgggacattgcctgttttgtgttgatgtgatcagtagttaaatatcttttaccattttagatattctgtgtcactttcataacattgaaaatttacttatttcgacagaactttattgagaaggttgctttgagataacaattataggccaggcacggtggctcatgcctgtaatcccagcactttgggaggccaaggcaggcgaatcacctgaggtcaggagttcaagaccatcctggccaaatagtgaaatcccatctctactaaaaatacaaaaatttgccgagtgtggtagagggtgcctgtaatgccagctacttgggaggccgaggcaggagaatcacttgaaccctggaggtgtaggttgcagtgagccaagattgcgccacagcattccaggctggaagacagagcaagactccttttctcaaaaaaaaaaaaaaaaaaaaagaattacatgtgaaattgaatgcttaaagcaggagttgtcaacagttatgaagtactaccatgacagccttaacttttaattttctactttttttgttttgttgtacttgtttgtaattgaggtataatttaaacacactaaaatttactttttttcatacgcaatgctatcagttttgacaaacttatgcagttgtgtaactattaaatttcacagtgaaagttctaccacctaaaaaatggccttatcttttccccttgcccttaggccccctgcaaccaggaagcagttttccacatctatagttttgtcttttcttagaatcatttataaacaaaatcacatagaatgtgacctggcttcttttatctagcacaacatatgtcattgtgtgcgtcaatagctgattcattttttttttttttttttgagacggagtctcgctctgtcgcccaggctggagtgcggtggcgctatctctgctcgctgcaagctccacctcccaggttcacgccattctcctgcctcagcctcccgagtagctgggatagcaggtgcccgccaccacacccagctaatttttttttgtatttttagtagagatggggtttcaccgtgttagccaggatggtctcgatctcctgacctcatgatccacctgcctcagcctcccaaagtgctaggattacaggtgtgagccaccgcacccatccagttcattcattttttatagctggatattccactgaatgggtgtactacagtttattcatttactagttgatggacaattgggttctttccagtttggatgattataaataaagtatttataaacattcacattcaagtttttgcatgtacgtaagtttttatttcatttgggtaaataatctaaaagtgagactctggattgtatagcaaaatatatgtttaactttataagaacctgccaaactatttttcgaagtagttgcaccattttgcactcacaccagtcttgtgtaagatttccagttgctccacataatttctaacacttggtattgtgacatttttgtttatttgcttggttgacattctgctagatgtgtagagccatctctgtgtgtgtgtgtgtgggggtgtgtgtgtgtgtgtgtgactttaagtgctccttgtggagcaggactaactaactcataggcactgtgctcagaattggcacattttgtttttaatttgtatatccctgatgactgacgttgaacatattttgttaagttatttgcaatctgtatgtctttttaaatattcaagttggccgatttgggtgattttttttgttattgaggtctttttatacaatcccaatcaaaacgcccacagactttttgtagaaattgacaagatgattttaaaatgtatacataaaagcacaagacctactagaatagccagtacagttttcaaaaagaattggaggactttgctggcagctctggtacctaaaataaataagtaagtaaataaataaataacaaatgaaaaaggattggaggacttatactagctagtttcagtgtggtacaggctgaaggataaacatataaacgagtggaacacagtccagaaatagacccagacatatacagtcaattgttttgacaaagatataaagaaagttcggtggagaaagaataatattttcaataaatggtactagaacaattggacattcatatgcattttaaaaaatgaccctcaacatatattttacatcatgtacaaagacctattaaacaaaattcggagcacattatataatgtagactatttctgtaggcattttaaattgaatcatgttgtgcaaactttattccatattattaaacattatcctacattgtgatttcttagaggttgcacagtgtcctatcataagaatatatctggatttatttaattattgacctgtttttaacattttggttatttctatattttctcctattacaaataatggtatgaagaatatcactttacctaaatcttagtgcacataattttatttctttggaaaatctctagatgtaaacttgcttgctcaaaggcattttattcttttgttgttgtttcttttatgagatagtctccctctatcgcccaggctggagcacagtggtgtgatcttggctcactgcaacctctaccacccgagttcaagcctttctcatgccttagcctcctaagtaggattacaggcatgcgccaccaagccaggctgatttttgcatttttagtagagacaatattttgccctgttggccaggctggtctcgaactcctggcctcaagtgatcagcctgccttgagcactcgcaaagtgctaggattacaggcatcatccatggcgcccagctgttttttgtttgtgtgtgtgtgtgtttgtttgtttgtttgtttaaaaaaaaaaaaaagcctacagcttccaatattcccagagggtctcccatccaagtactaaccaggctggaccctgcttaccttcacaagatcaaatgagagaaagtgcattcaggctgataggattgcagactaccttattttgataaacaacagctatcttctccttttgacagtcttcagggtagtcatatccaatgagaatttattacattgagatggaagagaaaatctgatatatactttaattattgagtaatctttttatttgttagttttgggctatgttttgttttattgttgttttctttcacacaacatatgccattatgaaataattaaaacaacatggaaaaagacaattaaaaatatatatatttggatgactcatctatgtaagtttgagttggcaagaacatatattgcttctttgtcattgagttcatagattttgtttcaatggtcattgagttcatagattttgtttcagtggttgcgtgcatacctcattcacggagaatattttagacattggagtaagtaggattaaccagcagcactagtttgaggacagtatgtaggaatccgtctatgagtattaatacctttacgtagtgaaacatcaagtccaattgcaggcaactctcccttttcctgatacatgacaccaaataatatattttctttaatcattacagtcagggtcagtgctgtggacttattgacttaatgagagaatatcagaacctgaaatcagctgtatctaaagtcttagaaaatgccagcagtgtgattgtaaccagaactaccataaaagatcaggaggatcttaaatgggctttttccaaggtaaaattcaaaatgtgtttatgttggtattctgctttagtagatctggtttttactcataaagcagttatctgcactattcttatcagtatacttagatgtgggtaattcatgctaatgagctcaactttttttcccctaggaatgctgacattctaggattctagcaattcaagaaaatggtgttatatatattcatatagttaattaatctcactatcactaatttctgcataaggtcaattatgaattaaatttcttagagacaaatggttttaaactcatgacttatcactgactattttattaattaagaaatcatttatccacagcatgaaactgccaagaacaaaatgaattacaaacagaaagacttggataactttaccagcaaaggaaaacacttgttatctgagctgaagaaaattcacagtagtgatttcagcttggtgaaaacagacatggagagcaccgtggacaaatggctggatgtaagataatcacctgggattctgtgaactatttaaatattcacattccccaatcaaatttttggacaaagcgttattcaaggatgtgaatttcacttttttttttttttttggagacagagtttcactcttgttgcccaggctggagtgcaatggcgcaatctcagctcaccgcaacctctgccttctggcttcaagcgattctcctgcctcagcccctgagagtagctgggattacaggcatgcgccaccatgcccagctaattttgtgtttttagtagagacggggtttctccatgttggtcaggctggtctcgaactcctgatctcaggagatctgcctgccttggcctcccaaagtgctgggattacatttgtgagccaccgcacccagctgaattttacttttaacatttagtactaaatgcaaaatgagagtctgaggaaaaaccgtgctcacataaagtttagaaataataaaatatgtatctgctttgtaaaaacttattctcagacttttgggaatttcacttgatagcctcagtcataacaagttataactctgaatgtttttctttcccaaactatgaaattatagataaaaaagaagaatttatgaacattctatagaatattacaccataacatataataattttaagtaataaggctataattttgcattggaaaacattgcacttgtaatttacatctttgggttttagttcttgttctgtcacttactagctacgtgaccacagaacaagtcacttgatttttctggaaatatagatatcaagccataaatattttacattaccttccagctaaaaaattcagtgattctgttgccctccttctatcaaaatctagtttcagatgtacagtggttcccctacttaagctaaatttaccagttagactttgatatttgtgtaatataataaaataatttggggactgcagaaaaccctacatgcttccacttttaaaagaacattctttggctgggcgtggtggctcacacctgtaatcgcagcactttgggagaccgaggtgggcagatcacttcaggtcaggagttcgagaccagcctggctaacatggtgaaaccccatctctactaaaaatacaaaaaattagccgggcgtggtggcgagcgcctgtaatcctagctactgtggaggctgaggtgggagaattgctggaacccgggaggcggaggttgcagtgagcttagatcgcaccactgcgctctagcctgggaaacagagtgagattccgtctcaaaaaaaaaaaaaaaagaacattcttttattttttttaacatgctatttttgttttatttatagcttttgggattttagtgcatatcattataggaagagtgataagcaatactattttattttaatgtgcaaaattggttgctttcatatgcgttatgttataaatatgtttgaatctaattaatgctaattatacctcagcattagaaataaaaatgcttattgttaatgctttcaaaaataaatacaacactgttcttgatggacctttgtcctgtagaattcaaccttatattgagttatagtagattccaatggacctgttgttgttagtatcccaatttacaaatgaaaatgcaatgtctcagaaattcaaacaactctcccaatgacagaagcaatctatgtattggttagcatttacgtgagttgggtgcacttattagattacaataatttttgtggaactgtttgtccgtcagaatatacttttctgataaaagaagcattggtactttggttgggggatgatcatcttacgcctctgactatgaatgccatggcttctgtttctctcctaggtatcagagaaacttgaagaaaacatggataggctgagagtaagcctgtccatttgggatgatgtactgtcaactagagatgagattgagggatggtcaaacaactgcgttccacagatggcagaaaacatcagcaacctggataaccacctcagagctgaagaactgcttaaagaatttgaggtaaattgactgtgttgacatatggcagctggtggcatattgttgaccagaatatgaaaaaaaaaaaaagtctttcttaaaagtttattcttcttttaacttttattttttattttattttattattatattattattattttaggcaaagttttgctctgtcacccagactggagtacagtggtgctccagatctcggctcactgcaacctccacctcctgggttcaagcgattctcctgcctcagcctcctgagtagctgggattacaggcatgcaccaccagacctggctaatttttgtatttttagtagagatgggatttcaccatgttggtcaggctggtcttgaactcttgacctcaggtgatctgcccacctcagcctcctgaagtgctgtgattacaggtgtgagccactgttccagaccttattcttctttttagagacatagaagagcattagagaactcttaactatcttttgctatttaatttgaacaggttatgaataaaagggtttttttttttttgcatttttatctatgcttatttagggctctttaaatcattagtagaaaagtaaaagttaattgttcccattcttcgggggatatggcatccttctacttcaaaaccaaattggaagtgtttgtaatttagtaatgtttagtatctatttttccttattcaaaaaaatcccaaactgctcactgagtccttaccatgtgctcttattatgccaggtagtggggttcttccacttccttttcaaaaatggaagaaaattggagattggagggtcacaggcttccacaaagagtccctgaccttttaaagttctagtcaccaattcactttaaacctttttattcctatttcttgcaatcatttgttaatcattcttcaaatttttaatgagcacctaagatatgtcaggcactgttttagacattgaaaatataatggaaaaacagaaagtcctaccctcgtgggatttgcattatttatattacaatatatattatatataaaatatcaagtagtaattgggctatgataaaagtggagtagggtaaagagaaatagagtaaggagatagtgactttggtccagaaaaatatacatgaatgaattgcattacctaacttatttgtctctgatccaaagaacattctaaatgttttattatctaattccaatctctgagggcaatcagaaggagaaaaaattatccagactaaaagtacaggcaggggtgatggataccgcagtgtcctcagctgttatctctggtgctaaactaacattacagctccaaagtgacctgtgctggatccagcttataccagcttgcaaaagtcaattgttaaatgttcaggaattttgggagccactgttaaaaacaaccattattaaaacttaaattgtaactaaatttacaaaataagttccattgaattcaaaggtaatgacaactaaaaacatatcacttttcattattcttctacatatcactactgttacgtaggcctttgagttattgacatctattgtatcatggttgaaataatttagaacaatgtactgctgtgtatgtcttcaactccatgttctgtgacgtcatgttgtagcttaccatggtggtaaatgctacaaatcagggctctttgtaggaggttgagagggagttgttaaagtaatcaactactattgacctcagaaatccaatgattcaatatgcttccgagccacattagatatgaccaggttcagttactcacagagatgggttctttatgttacccactgtctgtgtgacacactagctaataaaatcagtgaatcagattcagcccagtgcccacagggccattcccgctgcagtatagtgagtgtaggtaagtagcaagattcctcagttgctcggccagcttctggagaaagccagaggccctgacagctcatcacgtcttccagtaaggaaattcctttctgaattgaaggcatcaggaggtttgctagtgtccacaaagcaccaaaataccatttttgagaggaatagtttattaaatgcccctttgtggtttcatataactaatgaagtttacaagcatctcatttgtttcataattctttgatcttctttcctcttctttatgttactgttggtgcaaaaaaaggcaaaatattatgtatcaatatcgtaatgaatctgtttctgctttaatatcctttaaatttttatttgaaacgattcattcatattacacatagtctataataactaggcactcctgatgtgtacttgctttgaaatgcttcttcaagagtttcatgctgccatagtaaccagtaatattaaagttaatgaataaatgacagttagcctattgaaaatccccactgactcaagactttgggtcagtgtttaatttttttccaggaggttttttttcctaatacaaaggagtggagaaaaacaaagttctgcacactccttcacattcccagtgaacattaattgtaacattttccacgtttgtacatcataacagccctcagaaaaatgaaacagatttttttttacactggcttaaagttggggtatttcgacaaagttagctcttcttgaaattattaaatgccaaatatagcatgtcagtgtttttgattagttatgtttcttcccttttggcagtctgaagttaaaaacaaagcattgagattggaagaactgcattccaaagttaatgatctgaaagaattaactaaaaatctagaaacaccgccagaccttcaggtaagcattttgtaataactactagacttccatccattttgtaattactaccatatactagactttctctgtctctgtgtgtgtgtgtgtgtgtatatatatatatatatctcatatatctatatctcgtatatatctatatctgatacatatatctcatatacatctatatatgtatctcatatatatatatcatatatatgtatatctcctttatatgtcctcgatgttatcatcatcaccataattccaaggaaacatgtggattgtatcagacatgggagtcaaaatattaatatatttccacattccttcagccagtattaatagcatatttccaactcgaatattataataagggtagttctttttttgcctactgaatttcggaagcatttcagccaagttgcctcatggaccatttcatgtctagacaggaacagaaccccctctttttttggtgtttttgatgttggttgtttgtttgtttattgagacagggtctcactctgtcacccagggtggagtgcagtggtgcaatctcggcttactgcaacctctgcctcccaagctcaagcaattctcccacctcagcctccctggtagctgagactacaggcacgtgccaccatggcaggctaattttttaaattttttgtagacaggaggttttgccatgttgccaaggctggtcttgtactcctgagctcatgcaatctgcctgcctcagcctcccaaagtgctgggattacaggtgtgagccactgcgcccagcctagaaacccttcttatgaatgttgatgttcttattgatattttcctaatgctgttactgaataactgggtttagagggatcaccactataaacctcccttcacggcccttcagatggcacaaatccacgggaaccatgaagcaggccagggtagatcagcactggtcagaacacctgggctacttcagtgcccaagccctggaagcatccagcatggtgggtctcttttggctggcagccccactggctccaggctcaggtttctgctgcatccctttagcttccatatgtgttgctgcttctgttgattttctctacatttcctttcttcttcttgtgctttctctttgatttgctactttgggctaagcaatcaatctagttgatcagttatgcttttgctctgacctgagactgcttgttcagcagtaccattagggatgatatacatgcacaggaatgctagaagtttcgtgtgaagtaagaagacacaaaggaggtgctatccatatgcaaaaaagataaagagtccttatgcatgccgcctgtgttggggatatcaatggttaacagttggacttttacagagttgagcaggatcttcagagagttattggtgtactctagtcttctctttcttcctttctctctctctctctctgtttctctctctctctgtctttctctctctcacacacacacacacgtgtgcacatacatgcacccctatgtatactcaaggaagaggtgagggggtggcttaccttacctcaaggcagaagggttccggcagtgccacctgaagaacaggatatttgtcccctgcatttggcaggcatgggagtctgatctctatcccccaaagaatcctaaaagtgacagacaggctggctaactgctgctatatttgccaaaggataaatgatggcttgtggggtcctgcacctcaaagttagttggaggtaaatgccagaggtcactctggcccaaatatgaaccaggagaggaaaagaaaggaagagaccaccatatgaggatattataggtggcctaagaaggctatctggaggataaacagaccttagcaatgagaagttaaagaaaggcctccaggctgaggaatgagaaagtaaagagccaaagaacagcgcactgtcgtgtctagggaacttcactgggaagtccaagcatgaaaaaagtcagaaaaacacaagaccaaggcctatgggaggaggaatgaatgctaaaccttgcctggcctagagggcacagatgcccatccagtgagtcagaatgcctcacccgcctcctgccagtctgagcctatgggagaaagaagccttacacagggtggcagaatagaaataaaatgaaggaagagaaagaaagatatttactcccttccacactgttggtctcctgctcccagcagatctgaggtgggggtaagaatagaagccttcaatttaagttaagttcaaagttttcattaccaaataggccaggatgtttgaattgtggaattgagattgtttttcaatgtatagtgactatatgtcctttgactaactagggggccatagaagtcgaccctcctcagctatatcatccagggaaaagagaataactagccccactcaatattttaaagcaacagtggggacaaaaataaaattgttttatgataaaatcctacagtgatgtttgccccagatagtgttacatctgagcagacaatgggtatttccagggagaatcaagagcagatttttggtcaccacctgggaattctgggtaggtctagctctactttcagaatgccctctcacatcttccctggaacctcagttagagcttccactctcccacccagtgttaacacaatccttcctctttctatttgcccatcacttcatgtgtttggcaactgtgtccactgattttccttcttggaaaggcatattaacattggagctggcttccatgatgagacttgtgtggctttgacaattaagctgcacgtgaacagaatttctactgaatgagtattcttctggtcttcagagatattgatgaaatcttgcttgatatttagtttatagaagcagacttaatgcagaaactggagcatgccaaagaaataactgaagtagcaaaaggaaccctgaaggatttcacggctcaaagtacacaagtggagaagtttattaatgacataacaacatggttcacaaaagtggaagaatcgttgatgaactgtgcccaaaatgagacttgtgaagcattgaaaaaagtcaaggtaggtaataaactatcattaagtgcttccattcaaatggtgatcgtagttctgttttgtggtgactataataaaaaatataacctctgctctcagttacccatatgaacaccagaccaacttatttatgacattgaacacagcaaagtaagcaacacgtgaagaactgggtgcaggtgttcagaaatcaaaaatgaataccttgaaaatagaaagcatgtgttgctgtagtgcctgctcagagtctatgcttgttcaaagtttttttttcttttttataaaagggtggagcctctggaagaactatgtgacttccacaaattttcaaacttgagtatccaatagtttttcatcacttaattatatttattggtcactgtgacttctttcatccagataatgtatattttttgaaaaagaagaagttgagaaaacattctatttccatgttttctatttttttatttttattttttgagatggaatctcactctgtcacccaggctggagtgcagtggcacaatctgggctcactgcaacctcccctcccaggttgaagtgattcttctaccacagtctccccaatagttggaactacaggcacccaccaccatgcccagctaagttttgtatttttagtagagatgggtttcatcatgttggccaggctggtctcgaactcctgacctcaaatgatccactggcctcagcctcccaaagtgttgggattacaggtgtgagccaccacacctggcccattttcatgtttcctatccatattaatagataacattcctaattagctatctgtaaaggacaagcactgagttgacttttcaacaaatgcaatttgttctcttttagcatatttccttactgtactagaaactgaggtcttttttccttttttttttttaaattaactactggtgcttttggtgagcacgtgactctgaaacaaagttcaagtgtctcattgaagaatgtgaactgcgatggtctctaatcaattgactaaacccaagatcatggactggaatctataaggacctattcagtttgcttgaaatgctaaattatacctcacctcctaactacttcccaacagctgtttgttcccaaggagaactgggcaaaattctgaaagaatcagtacagatctagtacaagtactcaaaaacgcaccaaaatgtatacaccatggagtggattcaacaatgtcaatttcagattgtaaaacagtgccatagtgaagtaaatggagtatttctctcaagttatgaatatccttcataatatacttttattctgtaggatatacaaaaagaacttcaaagtcaacaaagcaacatcagctctacccaagaaaatctcaatagcttgtgccgcaagtaccactcagctgagttggagagcctgggccgtgcaatgactggtctgataaagaaacatgaagccgtgagccagttgtgctccaaaacccaggccagcctgcaggaatctctggaaaaacacttcagtggtgagttctgaggggccttagcatgagtagtttgtttccgagaaagaatccaaaccaaatgctgcctagaaactgccagcaaaagtttgaggaaactttccagggtgtcatttcaaatttgtttgtgctttgcgatttgagcaatagaagtgctgtgctggaggctctcaccctatgcagaattttttctttctttttcctctttttcccaagaaagcaagagttcaccatcttgatgattctgaatttcatctgcattttctatatatagctcatgtgtgtggaaaattacttccactgctcaagtggccagcagccactgtccaaacaactgctgaaattttttatgctatgatgaagtgacacaataaacttagatgttggtagaagccatgaaacagggcagccatagggtccaggaaattgcccatcctgtggccctgcctctgctttccacacagctgtgcctgacatggatccaccatgactccccaaaagaggaggtggttcctccctgtgccatcaaaatggctttaatgtccctggagcatttctctccttgcactttttacatattcaggcaattaattatttttcttgacccaaagagaaaacacaacaggatattagacattccaggaacatacatttctttttagtctttcctctgagataacttctcaattctaccatgaacattcatggctgtagatcatactgtattactttatatattattattttctttgtggaatattttgtaaggcaagaggagatgagctaaaggccagaaataattcatgtggtaatcctgggagcccattcaatgttttggatttgcttctgattttttatttttatttatttattttttctttcaaaagagtctatgcaggaattccaagaatggtttttgggagcaaaggcagcagcaaaagaatcatcagatcgcaccggtgacagcaaagttctagaagcaaagctccatgatcttcaggtatagaagctgacatccttttccttcttccccaaaatgtactcaggtgcctgcaggcagacctaagttatctcatttcccaaatcttatctgagccaatcttttcctcgtccctaacagaattaggctgattgagtcagaaggaaatagacaacatgataagtatgttgagaaacaagttggggctacagaatttccagatccctttcctctctttttttagcctattgacaattctttgaaattcattctaaactaaacctagttttaatttttataacaataagagtataataattgtatctgtattatatgactattgtggaggagttttaaaaagaagaagacatggtttgtgttttttagtaatttatggtctatagttagagataggagatattcaaactaaaataatagatattacaggttttataggttttactgactgaaaatgtatgagcttaggaaggagaaggccatggtgaagtagagttaagaaatgatttacagaagaataggctcaagttaggttttggccaagcttgtcaagcagctaatccgagtaaagcactatgttaagtattctaaaaagtaacctttttctttttttttttttttgagatggagtcttgctctgtcacccaggctggagtgcagtggcatgatttcagcttactgcaacctccacctcctgggttcaagtgattctcctgcctcagcctcccaagtagctgggattacaggtgtgtgccaccatgcccagctaatttttgtatttttagtagagacgaggtttcaccatgtaggccaggctggtctcaaactcctgacctcaggtgatccacccgccttggcctctcaaagtgctagttacaaacatgagccaccatgcccggccaaaataaatcatttttaaaagctaatgagaaccatgaggattttgtggcctaatgggggataaaaatgatgttgaaaattcattagattagaagttaacgatagaaagatcgttatagtaaaggaagctggttttgcaggaggtgtggagaattcagatgtagaattgtctccttttaagcttgaggtgtagcaaacgccacaaggaaatgcctgagtaacaggtgacataccgctctagacctctggggagaggcagggctagccctggactctggaattcttttgctttgtcaaagccctgtccaagcatagattttccaagaaagagatgcagaccaggaaaagaaagggcctgaggattttgcatgcagggtggatcaggggaggggctggaggcagctaaccaggtagaggatctcacatgaaccctgagagatggtggacctggaccatgttgggacagtgagaatggggagagactgagaacaagaccttggtgagaacgtcctcggttccagctcagccttgtttacactttgtcctcagtggttccagtggctggctgacaccattctcaatgaggagccttggttgtgcccaattgtatgcatcatttttactccagccttgttaagccattttcctttggactctgtttttcttctcctgctttactacttcagctcacaattgtaatgcatagtcccatggacctattacctttatttcctgaaacagaacattttggactcagtcagtgatgggcagagcaaacttgatgcagtgactcaagaaggacaaactttgtatgcacatttgtctaaacaaattgtcagtagcattcaagaacaaatcacaaaggccaatgaagagtttcaagcatttctgaaacaatgccttaaagataagcaggctcttcaagactgtgcttcagaacttggaaggtaggttagtttaacaaacatagatttcatcatacaccaagtgtgtttttaaaggcttagagaaaagagtcatgtgaataaataaataacgtttgacactgtgagtttaaattataataagctttgatcataaatacaggtgatactagggcaataatcaatttttcggactctgaagttatgacttggctttttttaatatagagaaaacaaactatatttactagtaactgaaaattatataaatgcatataatttttatttggttcaccaatatataaagttctgacacctcaatttttagattatacaaggtttttccttgtatccacttcatttgggatagagtcatagcagaaaacaatgattgaattctgtggatctagattccaataagtaatatatggtgaatatacgattagaaggggagaaagagccacctatgactagggtgagaaaagatgtcagtagaatcaaattgtctttctgatggcagaataatttgcctgactcttgcccagctttcttggagagcttacattgtttccaaaacttagagctcttgagatatatttgaaaatcccttaagaaacaaagacacagaggccactttcccttctcttcccagggactccactgccctacttattcactggccccaactcaagggtctttgtagtaagtcacaaaattaaagtgcacattgacatgggaatgtaatcttgttggcaattaccagctatgaaatcaattcatatccattggccccaattcaggggtcttcgtagtaagacacaaaattaagtgctcattgacgtgggaatgtgatcttgttggcaattaccagctatgaaatcagttcagctaggtgagatgattcttttcctgcttggatctcaaaagaaattgtcatgattttcactttgttattaaaataagtgataatttgggtgggttagttgttaagttttgttttgtttttgtcacttgaacattcatgaggtcttaattgccatttaaaagacattgtgacctcagctattaaaagtaatttatcataacaagcatgtaagaatttctctaaggcattttctttcccttagctttgaagatcagcacagaaaactgaacttatggatccatgaaatggaagaaaggttcaatacggaaaacttgggagagagtaaacagcacattcctgagaagaaaaatgaagttcataaagttgaaatgtttttgggagaactgctggctgcaaggtatggtccagaaatggaacaggtcctttacctcttaccatgttttagactagttggttggttggttggtttggttttgattggttagttagttggtttgtgggtagtggtttgtgctgtccttgaatgtctggaatacagaggactatgctgcactctttgcagcagtgcagtattctggtgagagtgcaggatggaagtaagaagctcatctgcattccagatccacctcctgtttgttcaagaaattgggcaggtcacttatctcctgttgctcttgattttagcctttaaacattgtgttaataatactgtactttcctctctgaggttattttgaggatcaattaacataatgtgaagctgatatgaaggaaagaaaaccacaaattcacagtgactgtaaagataaaaaaaaaaaaaaaagagtgcttgccaggtgcggtggctcacgcctataatcccagcactttgggaggccgaggcaggcagatcacctgaggtcagaagttcgagaccagcctggccaacatggtgaaaccctgtctctactaaaaatacaaaaattagctgggcgtggtggagggcacctgtaattccagctacccgggaggctgaggcagaattgcttgaatccgggaggcaaaggttgcagtgagccgagatcatgccactgcactccagcctgggtgacagagtgagactccatctcaaaaaaaaaaaaaaaggaaaaagaaaaaaaaaagagtactgtatatgtcaatttccatatgttattcacacatttcagcttccagttccatttcccacccacccatccttgtaatcttaataaagtaaaaggtatggtcaagtctgactttctttgtggtccctgttcccaactacagtatttatttcttcattgcttcccactgagaaaacgtttctggctcctttcccaggcaaagttccctgatctgtgcttttgaccctacattgagggctttgctcccaaatttgtgctccacccctggcattttcatttgcttgctctcctttggaagataggatactttccacagggaagtgcagcttggctttggctccttgggctcattacctgtcctcttaaagagccagtgcatctacataagaagcagaagaggatagcacccactctactttatcaaataagtcagaaacaatcatattagaaatcattctactataaagacacatgcacatgtatgtttactgcagcactgttcacaatagcaaagacttggaaccaacccaaatgcccatcagtgatagactggataaagaaaatgtggcacaaatacaccatggaatactatgcagccataaaaaggatgagtttcatgtcctttgcagggacatagatgaagctggaaaccatcattctcagcaaactaatacaggaacagaaaaccaaacaccgcatgttctcactcataagtgggagttaaacaatgagaacacatggacacagggaggggaacatcacacaacgggacctgtcaggggatgggggcttaggggaaggatagcattaagagaaatacctaatgtagatgacaggttgatgggtgcagcaaaccaccatggcacttgtatacctatgtaacaaacctgcacattctgcacatgtatcccagaacttaaagtaaaataaaaataaaaaagaaattccagaattcagatcatagtcattttctgtttccactgagtcctctttttagtcaaacatgcccagtattccttgtcttgaaaaacaaacatacaaacaaatgcacaaaagaacccatgctgataactacttgttggtatgctagtttgatgactgctataaattgtccctgaaatacattggaacatctctatgagcccttactatagtgtaagctcttcatttactctatgaaccccaatttccagctatgagtttctcaagatcagtgacttaagatctatatcatttctgttcattatctagtatagtgccagaaaatagaaaatgtttgctgaattaacagaataatagcatcattgcaaccatataactttctgaaaactacattgcacttaaattttgctttttaaatgttgactcgtgtctagatacaatataacacacccagacctacttcccttcttccagatgttttaaatggttttccatagtctcagcttttatttcttctctacaggctgctcattaccttcctctgtatctgcttctcctgccatcattacaccaaaactgcgttagagaaagtggcccaaatatacttcaacaccaaattcaaggtcttttatgttcctcattgtttttctaataattgcgactttttcgcattgataagcatgcaatccttcttgcagtttcagtctgatattccaggaccagatgctaagagatcttagtgtgcttgtttctgggtgctttctctccatcctggccacttctgcagacaatcctaacacactgttctgctcattcaggttctccacggggccacctgacttctctcactggcttgctgcttgctcctcccagtcttctagatttcttttcaccataatatttcactacttgaaatattttaaggaaatgccctatataaaagtacctcagcttaagactcattgaatttttatcatgcattaagcaatttatctcatagtaagaagggaaatctcttttcttgaattattatttaactcaaatcattgcttaagccaccttcttgtctcaccaaacagataacaagtataataaatgtcttttagagtaggtgtttttattttattttattttataagttccagggcacatgtgcaggatgtgcaagtttgttacagagtaggtgtcttgttgtataactcttagcagatctcagggtggcccataggatatatttgcataacagccactccaaaaaaatttgaaacattcagtttccacgagagatttgctttgtgttctttttctagtagtcacaatagtttatgttaagacatcccatgctaccctctgatatcctgggctttttcctggtaaatgtgcagataagaattcagaactctataaaatgggaataaaaccaaccaagccacatagtgcttacgttttccccttgatctaattaacatggctccaaactaagatgagctcaatacacaagatataacaagaaagctcataagtgctcctacaacagcttttcgaaagaacattttttttttgcacttagtctctgcacaatattgtgttgggtcttgggaacataagatgaatataatggccctagcttttagaaagtgaaaggcttttggattgagatagtcggcatacatggcgatagagcaagacaaggagcagagggcacaaagaggtcccacaatccccacccaccctgaattggtgtggatgctcctggggatgtgatgcctgcgccgagctttgaacaggcaactaggaatgcaacagtgctgagcagaagggttttcataaaggaggaatctccatgtagatacaagacagcaggggttttgagaatttcagggagcttttcctcatctgaccattaaataggaatgcagagatgctacggagaagcctgaagaggcagctgggaccattttctgaattaaatttctggaaatacagtaagtaatacagtaggctccaccactgctatttggatgcaggcacagcacagactgaatgttatcccccgataggtactgacaacattaggagagatcataagagaatgaaataaccaggtcagttcccagcatctttatttaaaaggcatgtcagctatgagcctgtgtctggttactgctccaatatcaacaatcatttgtcactcccctgcactccagaatgtcagaattaattttttttctttttttttttttttttttttcctttttttcagagagtctcttgataagctttcccagagagggcagcttctgagtgaagaaggccacggtgctgggcaggagggccgcctgtgttcccagctcctcacaagccaccagaacctacttagaatgaccaaagagaaactccggagctgccaggtggcccttcaggagcacgaagccctggaggaagcactgcaaagcatgtggttctgggtgaaggccattcaggacagactggcctgtgcagagagcactcttgggagcaaagacaccctggagaaacggctgtcacaaatacaggtacatgcgacaccagccagacactgacaactgctgaatgctaatttgattagattcacaagtgcttgtgttgtgtcctaattgttctgtaagcctctaaatgaggattgtgtgggcaaaatggagaaattgggcaaaaaaggatacagaggcatcatttttcccctttgtaagaggaaaatgttattttaatagctttaaataattttaaatttgatttagtaaatattcagcaagcgttactgaatatctactctgctccaagcactctgcaagttgctgggaatatagagataaaagttaggacccattttctaggagttcacagtctagggaagacaccaatctgtaaattgttactttcaatacagtccgtgtgtaggggccatgattaaagccatcaagggtatattgaaagctcagaggagatcaccaacccagactatagccaatgaagctgaccttgaaagagagaaattagccagccaattaatgtaggggactgctgggttttagacagatgtgtcttcattttcaaaagaatgtattttcactctttgaaactgaagtcaataaaattatactttctaggctagtggtcctagttttctaagaatttatattggaattaatctttgactcctagactcccagatacctaattttgagtcaatattatattgcaatagggcccagagtttgttgttttcattttaaggtaagtaaagtattcctacttcaattcttatggaaaactaccatttttttaaaatagaagaaggtttttacatgcctactgatgagtattctttcttccttcccaggatattctcctgatgaaaggtgaaggggaagttaagttgaatatggccattggcaagggggaacaggccttgagaagtagcaacaaagaaggtcagagggtgattcagactcagttagagacccttaaagaagtgtgggctgacatcatgagctcctccgtccacgctcaaaggtacagaacctatttttagtgtttgtttaagtccaatgcagtgacttagtaaaatgatggagcagtactgaggtctcctggggtggaattcccaagcattttactgtagcttgtaggcatgcctgtctttgtctaagttgtgttttccatagggcgatgactggtttttgcttgttattgctttgtttctgtgttcttacttgcattttttaaatatttaaatctacctattatctcttctggaatcttatgtgacatgggctcagcaaaacatctcctttcaagccatccaagcaagaatatatggttctttaataacttgaatacattttagcttaaggaacatatggaaaattaagctattggcagctgttgagcttagtcgtaaatctattcctcaactagaagtcatactacgcccatttgcattataggaaatgtgtaggatggttttgattgtcacagtgacgagggaatatccctggcatttagtgactgaggcacagagagctcatatcctacaaagtgtggaacattctcccacaaccaacagtcagtccatccagaatagagcccagccgtagagcctctgttgaaaatcatctgtaccagatgttgatgaggaagcagggaagtccttgattgttataccaggtagtgtttttgttgtaattataagtgagagatttctccctacctccctcttctcagagtatccataaataatctggctcatttgttggacaaatgaccatcagtctgaattacagtaaaaaagagccatattctgatggttatatatcctgttagatcattgacacactgggtgcccaatgtgatcataacaaaatagatgaatagaagattaaagttcatacaaagaaggggataacagacactggtgcctccttgagggtggaaggtgggaggagggagaggagcagcaaaaataactgtcatatgctaggcttagtacatgggcaatgaaataaatctgggcagcaaacccccatgacacgagtttacctatacagcaactctgcacacgtacctttgaacctacaataaaattttaaaaatatttaaagaaaattcaagttcattacaaagcaaaacaaaaataacactacagttatccacggcaatgtgaacaaaaatccctggttacaactaacaatttggagggtttttttgttgttgttattattgttgttttttcatttaatatggagcataggcagtgactctcaaagtcagcaggattttgcatcttagtaataactcacaatggtcagcaaagaaaaaaaatcagatgctatcattgtcttactctatatcatagactgctggagcgtgaactaagcttccagaggcttggcttaggccagtttcctaaaacttcataggaatatgggtagatatttttcagatgttagaataagatgttacatgcaggaagcagactctggtccttgactccactatttcagcaagaaattaaatttgacagtgacatattgagtgatagcaatgttcaaattattgcattaaaataatgaaataaaacagaaaggtttttgccctctaaaagctcagacaccagcacaggatgtattttggaatactctgactcagactatgttactaaccattttcaaaacacattgtggagttgtagaagaatgcagagtcttggctcatgcctgtaatcccagcactttgggaggccaagttaggcagattgcttaagcctaggagtttgaaactactctgggcaacggggcaaaactatgcctctacaaaatatgcaaaaattatctgaagtcacagtcaaaattcaaagaaagagaaacaaaatataaaaattagccaggcgtggtggcacacacttgcagtcccagctactcgggaggctgaggtgggaggatcacctgatcagaggacacagagattgcaatgagctatatgattgcaccacagcactacagccttggtgacagagtaagaccctgtcaaaaaaaaaaaaggcggggggtgctttttagaaaattatttgaggaacaggtaggactgtaaagcctgcatgatgaggttccaatggatcaatggatgcaaagatgcaaaagcaacagtttgagcaaatactggaagttcatttaccacaggattttaatttcagactcataggcttgtatgcagggggagctggggaaatcactgcagatgagtttagaatagtttgtaatgcttaataatggagggatttttcttaaatgccagtctggagagcgtttggtttgactatggagaaagctattatatttgtgactatttttcttataaatacttgagcattcattcacacattcgacacaaaagcactgtatattgtgtgtgtgtgtgtgtccccaaatgaaaatcaacctaatgatagatcatttactcaggaaggataccttgaattttgaattccagtcaacaaataatcaccatctgattttaataagataaactattgataattccaagaaaattaagaactgatctatatgaaataaaatttcattgatgttcccatgctgattttaaacaacataacatataaatgtatattgctcatttagaatagttagcatttggaagacaaattccagatgcatgtatgaccacaacttcttatttcatgttttaatatagattgactttgttcaaaggacctgtggtaaggatcttatggatcagagaagtagtgtttctccctgcactcaaaagcaacattttcatcacttccagtagcattcaataaaacaattggcatggatgtcacgactttgtgattggttttcagtagagatgtcaaaataattcatttttgttaatatgtgacattaattctagcactttagagtctgtgattagccaatggaatgactatgtagagaggaaaaaccagttggagcagtggatggaatcagtggatcaaaaaatagaacatcccttacaaccacagccaggtctgaaagagaagttcgtcctgcttgaccacctccagtccatcctgtctgaggcagaagatcacacgagagcccttcaccgtctaattgcgaagtccagggagctctacgaaaagacagaggatgagtctttcaaggacacagctcaagaggagctgaaaacacagtttaatgatataatgactgttgccaaggttagtgctttatattgaaagtagatgctttataatacattaatacaatatattgatttatattaataatataatgactgttgccaaggtcaggtaaagaagaaactgtggattaaattgttggagaattggctgctctaaaactatttgtacattcagtaaatgggtatgacataaagatcatttcttactatgaatgcctattcatttttctctttctacaatcttgggattattctttattgcttatttttctctttctccgcttttttaatctatctactttgcacatcaaatgtcgccgttaaagttgtttttcttttgctacacttatatttgttatattaaatgcaagtctatttaccgtcaagattcagtcgtgtacgaaatattgtgttcatctctcatcttagtaaaaacggtttctattttccaaagtataaactcctttatataatatcaaaaatatctttccaattctctatatgaatctttcatttccttcatgattattctttggcatatttgtaaatattatagaaattaagggagagagttgttgttgtttgctgctttttcttttctttggtttgccttcttgggaactgactcttttcttcttgacattatgattattaatagatgtgcttgtttatcttcgttttcatcttgttaatgattaagagctatgactcaagtcaaaaagacgttaagtttgaattctggctttgacacttttgaatgtgtgactggccacaattacccattacctaacctctctaagcttgagtgtcttttcctataagataataataataatagtatcttcctcacaggactgttatgaagattaaatgaccaaatgcatttaaagtgctgaacagactgctgtacaccaagctaacaaataattgctttaattagaatggttatgataataattattaagaggatttttagtgagggatgttagccaacatgaattaagcatgatttccatactaaggtagaaaatagtaaacttacaggaaaatagttgcttttccaaagccttgacatttagttaaatttgatagtttcttcttaagatattaaactcagagaaaattcaagaacaagaatgaaattttctgagatgtgttaagagacctctatcaggcctgttgtcttacctgagttcatgttctcaaaaggaccactgttaaggtagtcttttctttgtttactaggaaaaaatgaggaaagtggaagagattgtgaaagatcatctaatgtatttagatgcggtccacgagttcacagattggctccattcagcaaaggaagaacttcaccggtggtcagatatgtctggagattcatcagccacccagaaaaagttatcaaaaattaaggtcaggaaatgaacagatgctatatctacattgcttcattccttcttgagtacttttgataaagattttgtagataagattctgttatttaaaatgtttccttcctgttttctatttgatgcctcactgattctacacataaacaagagtcatgagaagaattcaaaagactttacacttatgagcacaatgtaacattgtctttacatttctgtatgcaaatgtgcttgttgccgtaatatgacaggctaggaaatggctaatttggtgggctgacaaaaccagatactattgtttagcaccatagaagaaaagtttatatagtaacttagttaaatgtattctaacaataacctgaaaatgtcattctggatgttttgttctgcttttctagacgacatccaacaacataatagaagggagtacttcaaaggaccttaaaattatcatctcgtttactctgcataaggacaatttctaaaacagaaatttacctttctgggggagtttcagactctggtatcttttagtaaatttctagttgcttaaatattaaattgtaatcattttcccccatggaaaatggattttaacattaaaatgaaggagcaatgaaatcctcagtggtttagttttagaggaggaaatgttaggaataaatagtgtaattgtggccaggaatttaaaactcagattgtgttttgattccaagatcagaacataaaagtcataaaaattatagctgatggttacaattgtaaccacattttgcagatctatttttttttttttttgaaatggagtcttgctctgtcacccaggctggagtgcagtggcacgatcttggctcactgcaacctctgcctcctgggttcaagtgattctccctgcctcagcctcccgagtagctgcgattacaggtgctgaccaccacgtctggctaacttttgtatttattttagtagagacggggcttcaccatgttggccaggctgatctcaaactcctgacctcaggtgatcagcctgccttggcctcccaaagtgctggaattacaggcatgagccatggtgcccggtccctgaagatctgcttctaagtgctttaaaagtattatcttatttaaatcttatgactatgtatgttttaactgagataatcacataaaaccactttttaagtcctttttttgtgtgttattctttaaaattcttctttgatacatttcttcgtaatattctgatttattcatccatccttccatctatccatctacccatctatccatttattcagccaggactgtgcattccctaaggaacttgcagtctagtgaggaacagcgatccacaaactggtctttataaaataatacaaaaaatgtaatgagagcttactgtactattagagttcaggctctggaatcaaagaaacccaatgccacatcctccttctattggctttctagccgtgtctgtcagcaagttacctgatgtcctcaagcctccacctctcaattggttaaaaaatacatacatgaaaatagtacctgtctgataaagttgttttgacaagcaaattagatcatacacataaaacctgtagcatcatgcctggcacatagaacacacccaataagaaaatccagtggatttggtaaatgattgattaatgggctatagcatgacaaggtgggaagagtcaaggatgatggtcaagtctttgcctagaatccacaggactattaccacctgaggaaaataattgcatgcggaggagcctggtgatagaggtgaagacatgagctgttcattgatgatcagatccagtttgaactgccaggtagtagtaatgtcttgggggcagttgtaaattcaagactgaatttcaggttaagaagacggatagaagacatggagttgaaagtgattagtgtctaatttgttgttaaagccactaaaacagataaaaccaagacctatgtatagagcaaatagaacaatgggcacaggaccaaaagctgggtactaccaatatttaatgagccataggagaaaatgatttgaaaggtagagagaaaaaggaggggaaaaacaagaaggggaagagtaggagggtgtgatgccactgaggctctaagtagagaaggtggtcgccatcacaggtacagcaggaggctgccattaggaggaatactaaagaatcccaactaggtttgacaatgaggctgttgggcaaccagtctgagaaacatttgcacagcaagggaaggtgagaaaccaggttacatggatttaggagtaaatggcaagtgaggaagaggagatagcagaaatggactaatgtttcaaaaagttaataaataagagaaagtaagataattctttcacaaaggctgcttcctgggttgacaaatactcttttttattgagaaagcctttataaagtgcttccataaagacaaggaatatgggagaaggaattggcagaaagaaattgggatggagaaagtgaagactatcagaaactgcctctcagaagttcaggtccagcctgaatgtaggttagtgtgtgggtggttttaaaaaccttggaggaaatacataaagcacctcctctgtccttcaacaccatacctatcacatccacaggaataatcactgagaaaaggcaactctaaagcaaaatgtatatgggtgtgagggcgggaatgtacatatgtgtgtatgtgtatatcatatgtttaaaaatgtaaatacaagataagaaaatatatgcaaaagccatttcaaaactcttgacaatgatgatgtccttattcaaattctgaatgactagatttctgattgcaaatattgaagtgttccattttcatgctaaggaaaattgggataaagcataagagagtattttgggaaacttcaaatttgaaattgctcacaaaggcaaaataattacaagtattaaggtctattagttagacatagcactggttaaaaagttagatttttttcttcatcaaataactactatacacactaataaacagtgatggtttttagaatcctgctgctgagaaggttgaatatacatatcatgctgtgtgtaagggttttcatgtcattgtaatttagactactgcacaactgaatactaaatactttcaaatgatctatattaaaatatggctctattgtatataattatgaacagatatatttatttcaagttaatttaatgagatgcaaactatattatatagactagttaagacatactttatgcttaacataatttattaagcatgcttcatacttaacattccaatgtttctttacttgctaattggtcattgattttcttcttgaacatttttgtgcctgattatcttttatttctatttaatccggtagtaaagtcataattttgtaataatattaacaaaatcctgcctttagcaatagatatgtaaatatataaacatcggatgattatttcaccaagaaaaattttagtaagagaatctattctcagaaatgctgcaattatatcaatttaacaatgtgatttaattttatcttgttttcctttacagtatttgtgtgctttaagatcgagctaaattgttaacttggctatagctaaactgttaaatttctagtgacttttttaaggtaaaaaaatactaataaatgtactcagtctagaggttactttaaacttttgagtaagtcagtctatgaatgaattattcattttatatgctacaaaaatgtttacttagtattgaggtatttggaatcgagtagggctcattcttttgctgtgatgagtctgcttgattcctagtagaatggaagtgtgatttaagccaccaccctgttgaagaagatgaattgagtatagagaccgtgagcagaacacagttctgccacgatctttatttacttgagcatccactttgagggaaatatgggtttaatcatttacaggagcaatccaccacaggcaaacacttgagtcactaaacattttcacgtgtgcgaataatgcctgatttcagggtctctgtttagtctgtttcaggatattgaggattctcgggatttttttgccataagccttaggcactcgtgatgacaactcccgctattataatttaagagtggacagatgaattgattctgggtccttgtggcacacttgttaaaacttcctggcaggacagggtccccctgtgtacacagttgaaaacttgcagtccaagtgactcacaggctcttcagttaccatggtgatattccattacaggagctgatagattccagagagattggtgcaagccgtctcagcagagtggagtcgctggctcccgaagtgaaacagaacacaactgccagtgggtgtgagctcatgcacacggagatgcaggccctgcgtgccgactggaagcagtgggaagacagtgtattccaaacgcagagctgtttggagaacctggtcagccagatggccctttcggagcaggaattctcaggccaagtggctcaactggagcaggccctggaacagttcagtgcccttctgaaaacctgggctcagcagttaaccctcctggaaggcaagaacacggatgaggagatagtggaatgctggcacaaaggacaagtaagttggcttcctgttttctattggtggttatgctttaaaaaatgttttgactttcatcattccttaaaaaaaaaatcttgctaactaaaaacacgcaacatgcacacttggaagaagtatttatctcattaaataagcaaaatctgatttgtttccttttcttatatatcaaacttttgtaaaaataaagatttgggttattatttgcggtaggaaacatttgttgttagtggagacattttactttcattcctatggtgtaagagtctgtaatactgtattcagccattcagtctgaaaaatggcctgtgggcaggggcataaatagacagagagtcatagctgttttcttgccagttaactatttcatacaactaaatgattgaatttatagccttaaaagactcacttggtaatctcctacagcacagcaaatagttatctccccgattagctctcctctgtgtggttttgacagctgttcttgaattagcctgttaacagaactctacgtcaccctccctggtcaccttcccgagactttttttttttttttgaagctaatggcagcttctttagaatgtgagaaagggaagcctacgagggagaccgaagaatgagcaagagtgtaacctcttcttcgtttctttcactgttaaacagtatctttgaaagccttttcaatatttccagttttataatgccctgattcatggatgtccttaaaaggaaatttagtaaacttctctgctcctatttatattacaatcatttcaaaatagctcctgccagtaagaaagtcatgtagtatttccagcagtgtctggttttaaatcaagtatttgaaacaaatgcagcatgccataaaataaagctttctacctctttatgctactctatttataatgattctaggtttgggggtttgtttttgttattctgttccatttcctgtcctttagatttatgtaccagaataaagcatagaaatcagttctgtcacagagggacaaagaagttgataattgctctacatggtataatatgaaaaaatcagttacactttcttggttcctttttctttccctttctttctattccagtcacagagtgaaatttttaaaaaggaaagatttggctgtgcctagattacattactattctgttcattatttttacgttgatattattagtaaaaataatggttgaggcctataaaaatatacatgagaatgcagtagtaaatatgggttttcagttgtgttaaatagttcaaatgtgacagccctctgtgtatgtctgcttccagatttgactccagggtcaatgcttttgatgacaatgctacattgcttctcaatattcatgttttcttttatttctaataatggcattttatctaaaagtggagatatttctatcacaatgaatatgtaagaaaatgttaacaaaatagtaaatatgctagggttcttagggcattgttttgcttttagggaggacttgtcattgttgatgatcacaataagaattaaagtatttattttatgcaattagatgacaatactcaagaaattctttaaaacataaaaacagatgatctataaagtatataatataatattgtaaaaataattctatttactatgtttgcgaaactcatttatcttaatatcctttgggatattagctttggaaataattttcttaagctgtataaggtggaaagatgcattctagaacttaacagaatcagaaatacataagctgatatttatatattgactctactgacatactttaggatgaagttatagaaatgttttaaatgtaacgttttggtcaaaaacttttcacttttaatgtcatcccattcataagtaactgacttgaatctccagtatttttatgtttttgttgaatgctaagtttctttagttcttacaatgttctgtcttaagtaaaaggttccatatggtgtaaaatagttggtcctagtttagtgtttggaatttcagagagaaattgtttagttgttgatgaatttttgtaaataaaaatgtcttagactcctccagcccagacaccgagttaaataaagaattgacaaaccaagagaatgtcattcctgctctcataatcacagcctaggtggggagatacgcaagcataaagccaatgtggatactccttgtgatgaatgtctgcaaggtcctgtgtatcctcagatgagaaacccgaagaggtgggaaggagggcagggggtacttaaaggagttgttatttgagttgagtcttgaggtataattaaaatgtgacctgacaggtgaggtagaggaacagcatcaagatgcaggatcattgaggaatcagaaaacacaagagaggaacctagagaggaggaatcagattaggaggatgtagtgccacccccaaaagaaataatgaatatgtaagtgggtctgtgaaagtcaacgtgcagaggcaaagaggggaatgatgaaaggagctaagacacagaataagctagcctggatatctcttgcatagagtgagaaaggaaacaaagggagaggcccggatgatgcttaatcttctgattgacatcagcgggggacagtggtgccatttaccaggacgaggaatgaagcacagggctggtttgttgagggatgtggtttctttacaaatctgggccatctcttgacaaatatcagacaataatggtcacagcaaagctatttgagtagttactcatctttttgcccctcctccttaatttattttgtttttttgcttcagtgctactgttatccacagtgtttacatatttgggagtcattctccttctgattttatgaattagacacttagtgtgctaggaactgtgctaagtatttgacattcatgatttcatttgttccttgtgacaatcctatgagaggaacactctgagtgcaaagcaccttgtgtaactcagatgaccatggcctcgatttcagaggtgtacttttcaagtcctaaggctttattttggattgggtgtacacagtaatgtagctattcatgtgtctccctcatctattaaattgtgagctcttcaagaacaagaatcttacctttattcgtggggggacttgggtcccagaatccagcaaaatgcttggcacacggtaaacatttagcaaatatttgatgactttatgaatgaaactatgaaataaatgaattactatttaaaccagactcatggattataagaaatttttaatgtaaaagttaactgtatatacaacataaaatcaattgaaacaggattcaattttggagatatatatatatatatatatatatatatatatattttttttttttttttttttttttttaagacggagtttcgttctgtcccccaggctggagtgcaatggcacaatctcggctcactgcaacctccacctcccaggttctagggattctcctgcctcagcctcccaagtagctgggattacaggcgcccaccaccacaactggctaatttttgtattttcagtagagatggggttcaccatgttggtcaggctggtctcgaactcctgacctcaggtgatccaccctcctcggcctcccaaagtgctggaattacaggcgtgagccaccacacccggcccttaatatatatatttaatccaaaataagtgttgcttttctttaaaataatttgttttcacctttaaacaatatacatatctcctgatggcctagtccaactatttatagacaatgtaggctattttttctttttcttgtcttatttttaagtcatttcaccacttaatcacttaactactttgcagtatttgatgctagagtgtctatccatggcaagaaaaaagggacaaatgagccaggtgctattatttgtcagaggaatcctgaaaacaggcttcatttcttcattgaatctaccatgttggttcttctctcactaataatttataatatgattgatgcatgtatagtgtgaagatatggagatcacccaatgtaagtgctcgcttctttgtctcattatttctgaacaggagatactggatgctttgcaaaaagcagagcctagaacagaggatctcaagtctcagctgaatgaactttgtcgattttccagagacctgagtacctacagtggaaaagtttctggcttgattaaagagtataattggtgagcatgaaccttattggtgttcaagatatttttatacaaattagaagctagaagtttattttaaggtgtaatttcaaaataatattagttcagcattaaatatattactaagtgaggtaagtgcacattctaagaactggtgattctatcaaacatgattttcatcaactttatcgctttttcctgccattaaatttttgcatcaccttttcagtctttgtttgcaagcatccaagggctgccagaataaagaacagattttacagcaaagatttcgaaaggccttcagggatttccagcagtggttggttaatgcaaaaatcactaccgccaagtgttttgatatacctcaaaatataagtgaagtttcaactagtcttcagaaaatacaggtaagggtgttatcaattaattctagtagcagtgctgatgtgaactaaagttaacctctaaatcaagggtccccatctcctgggccgcggactggtacaggtccctggcctgttaggaaccaggccgcacagcaggaggtgagcagcaggccaatgagcgttactgcctgagctccacctcctgtcagatcagcggtagcatcagattctcataggagcctgaaccccattgtgaactgtgcacacagaggaactaggctgtgtgctccttctaagaatctaactaatgcctgatgatctgaggtagaacagtttcatcccgaaaccatcccccctgccccaccccatctgtggaaaaattgtcttccctgaaaccactccctggtgccaaaaaggttggggaccgcttctctagatcttttcagaagggcagaacatataaaagttttgcgtaagaaattcaaatttcaaataaatccccacttaaaacaattgcttctgtatatgaagaggaaccagttcatttatataaatgcacactatttttatatattaatggtgatccaggaaataataaaacgttttttctatgtgacaagcattgttcctgagcactttaagtggattttctcatttaattttcacaacaaccatttcaggtatgtaaatttgttactgtcagtgtacaatagggtaaaagcgtcagtgaggtcacagagctggtgtgttaagatagccagagctgcggttatattttatgtttgttcatttgggtttatttttctagtctttttttttaacctaactgtaacttcatggtgctaattcacataccaccttcattcaatagcagcactttttaagcacagttattgaaattgcttttcgtacctgtatgtccgctcatttcacatagcagcagttctgagtgattggttatgaaatttgagtttctttcagagggcacaggtatgtagaacactgtgtgtaagcactcgtgcttgaagtgtctctagtaggagcagactctgaaacagtattgttcatatgtagttcacctttttaaattcttggttaataacttaatataacaggacaactctgcctgtgaaaatttgctccatttaaaattcttccaagccaggcgcggcggctcacacctataatcccagcactttaggaggccacagtgggtggatcacttaagatcaggagtttgagaccagcctggccaacatggagaaaccctgtctctactaataaaatacaaaaattagccaagcgtggtggcaggcgcccgtaatcctatctacttgggaggctgagacaggagaattgcctgaacccaggaggcagagattgcagtgagccaagattgcgccactgcactccagcctgggctatagagcaagactctgtctcaaaaataataaaataaaataaaataaaataaaataataaactaaaaataaaatgtaaaattcttcccgttttgcttcaggctggtgggtagaactgcagaaactcaatcacctatttttctatattggagaaacacagtgctatttttcttttctttttatttatttatttatttatttatttttgagaaaagtgtttactctgtcacccaggctggagtccagtggccctatcttggttcactgcaacctctgcctcccacgttcaagcaatcctcctgcctcagcctcctgagtatctgggattacagacatgcgtcaacacgcccagctaacttttgtatttttggtagagaaggggtttcaccatgttgctcaggctggtctcgaagtcctgggctcaactgatgtgcccgcctcggcctctcaaagtgctgggattacaggcatgagccaccacacatggctagtactgttttagaggatagcctttggccttttctctgaccctcccaccacagcatgcctccatggacagggatggccatccattaagacaaatgtcctggcaaagtttctttaatcaaaatctatgacaaaatatctatgcttctgtttcttgtcagaataaataactttgagcttgtgctttcaatttcttctttagcacttgaaaatattgagaatcgactgtagaatacagaatctacccatttttctagaggaagactattctttgagctctagccacatgaaaggaaaagtatatactgtagctacactttattaaactacactttggcactaggtcattgacttgtcctcataaggacaaccctatgaaacactctcttgttatttttttatataagctgctactaataatgtaatctgctccatttaatagcatttatttgaataagattccccacggaaattcatctgctgtcttttcctagggagaattgtgcttctgctgagcagattatgtgtttttatccagtaggctctgcgagtcttgtccctggttgtgtttactctttcacttcggcagctaggatcctcagagccaaaatcataatccagctccaccaactatatggaactacaaggcatttgttttgtaaacgagtcttagccagagtttattttattttacagctcttatcttcccttggtcttcatttcttctcctgattatttttatcaaatttttaatattttatgagattgctcaccacctttttgagacaagtcagaatttagattggtaaataaagtagtttgcaacttgactattaaaggataacctgggtcatttaacgtatacagtaaaaagagcttacttccttttctttgactttattaagaaataatagaaggtgggtgtggtggctcacgcctgtaatcccagcactttgggatgccaaggtgggcagatcacaaggtcaggagatcaagaccatcctggccaacatggtgaaaccccgtctttactaaaaatacaaaaaaattatctgggtgtggcagcatgcacctgtagtcccagctacttgggaggctgaggcaggagaattgcttgaacgcagaagacggaggctgcagtgagccgagatcgcactactgcactccagcctgagtgacagagtgagactccatctcaaaaaaaaaaaagaaaagaaaaaatagaaacaacacacaatattttcattatggctaattctatattttcttttataggagtttttgtcagaaagtgaaaatggacagcacaagctaaacatgatgctgtctaaaggggaacttctgagtaccctgctgaccaaagagaaagcgaaagggatccaggccaaagttacagctgcaaaagaagattggaaaaattttcattcaaatctccaccaaaaagaatctgctctagaggtatatatagccaaccacatggaagcattctgtgttatttgttattgttgttgttgttagtgaaatcacagtttctgtatatcaaagcccccttgtcaatgattttggttacccctctcagaacataagaagacaatgggctaacagtaaggaatagcccaatgctagaagtgggagcctccctgaagaattaagtagcttcctgcatgttagggtctattgtcactgacttggccttgcactctcccagcaggaacagccagttttacatttcagcagaacacttagcctttcatgtgaactgtctcatttctggaaggtggtctaggagaatgatcaggaatatctacataagctgcaaaatgctgcagatgagagtgtatattataactaatgcaaataccaggtagtaggtttttaggcattaagtatgcagaaacaatgtttatataattttattttctccacacacaatagaagatgaatctattataaccataaaataattactgccacaatataattattttttttccgtctgagactatctattttatgtatcgactcttctttcagaggaaaatttagaggcatagagggtatcttttccttttaaaacactttttggcagaatagatccttcatttgtttgtgatcattattaatgaaggttggaaaaagataatgatagagaaataatattcagtaagagaaaatgtgtatttcctcaattatttcctgatccaagaccattgatctctgttttgtaatggtgactgttttttcgtggccagcatcctccatttaacagagtgataaccattgtgcctagaaatgtttctttaatccttcagggatcgttaatgctatgtggtctgagctctgaagcatcagctgctgagtgtagcatatttagcattgattacaaggttatctagttcaagagatgcccaagagtaggtgagtaggtcatgaattgcctgttttcttaatctgctgttcccctcagaataggtatctatctgttttacttgattctttcctttcctttttcccttcctttctcttcttttcctttcctttcctttcctttcctttcctgtcctgttcctttcctttcctttcctttcctttcctttcctttcctttcctttcctttcctttcctgtcctgtcctgtcctgtcctgtcctttcctgtcctttcttatcctttcctttcccttccctgccttcccctcccctctcctcccttcccccttcccttcccctcctctcccctccctctctccctacccgtcccttccccaaccccttcccctctcctccccctcccccttcccctcccctctctctctgccttcctcttccccttgccctcccctcctctcccctctcctcccctccctttcccctctcctctcctcccctcccctctcatctcctttctttttagaacctaaattcctgatcatggtcccccatttgccctgttttgtggtgtattagttcattctcacgatgttataaggacagacccaagactgggtaatttataaaggagagaggttgaattgactcacaattctgcagggctggggaggcctcaggaaatttacaatcatggcagaaggggaagcaaatacatccttcttcatatggtggcaggaaggagaagtatgagccaaagcgggaaaagtccattataaaactgtcagatctcatgagaactcactatcatgagaacagcaacatgggggtaaccacccccatgattcaattacctcccattgggtccctcccaagacacatggggattatgggaactacaattcaagatgagatttggggggggacacagccaaaccatatcaagtggccccatgaggctctagtaacaggaagatggaaacaccttgaatttatgaatttaattattcaacaaatatttgttgagcatcttctatttgtgaaggactagtctaggctctggggctatagcagagaataaaacagaaccaagtccctgccttcatgcaacctaaattttggtagaatactccagaagttattttggtattttacatttgtgagatactaacttttcaaatgattcttacagctaacccatatccctcagaggtgagtaaggcagatgtgattttccccatattgtagacgacccagaccagatacaggtggaaccttgaactattctctcataagtttcattagctcttgccacttagattcttcagctaacctttatgtactccctcttggacaatactacctaaagtactggttgtttttacagcctttagttgactcacagggtaacataaataacaaattcacattcacgtccacctaccactttataagtaagagacagtagatgcagacacctttgctaaagttagacagtaccatataaaactttatcaaacacattttacacctagggtactacatagtaactgtgaaagtattatgacattcttatgtgataagcacataacattatttagtatttcttatcacttgataaatcagaataaattatttattaacaacataatcacataaactacatggatatgctacttcttgtaccctcattaatgaaaatcaaccaaatgttgactaacatttctttacattcctgtaaggtactatggtgtgtctccggaagtgtcagacccaggccctcccctcatggagcttgcagtctagttctggagacaaggcacacctgtgtcagatgaaaattcacaatccaacctagtctatgatgaagtatataggcatggtatagacaacaaatgctctagaagttgagaaatgggtgtgatctcagaagtgggccagagagttagggggaaaaaattctattttcaaaaggagaaccctaaaaagttcttaaaggatattcaaaaattgtgtttgtgccaaggtaaaagatggagtgtttcagactttggagcgggcttggttttttttttgtggaattttttttttttttttttttttttttgagacagagtcaccctctgtcacccaggctggagtgcagtggcatgatctcagttcactgcaacctctgcctcctggattcaagcaattctcctacctcagactcctgagtagctgagattacaggcacatcccaccatggctggctaattttttgtattttagtagagacggggtctcatcatgttgcctaggctggtcttgaactcctgagctcaagctatctgctcacctcggccacccaaagtgctgggattacaggcgtgagccactgtgcccagcctgggtggactttgaatgccaagtgaaggaccttggacttgctattaaaatattttcttgtcctggacactatctaaaaccttgcagaatctaaagatccaaatgaaggactttgaagtaagtgctgagcctatccaggactggctgagtaaaactgagaagatggtccatgaaagcagcaatcgcctctatgatctgccagcaaagaggagggagcagcagaagctccaggtgatgagcccgcctccccgtagccccatctgacctagtctttgtccgtcctctgtcgaccttacagatgcatgctcagcacccttgagttagactgtgctgccgtgagacatagtgtgtttttccccatttctggtggattttatgttttctgactttccttggaagtatgatttgtttccttccatgatttgtgctccacggtgtgtagattggagataataaagcctccagggtacacggactgcctgccagtgttgatttccatgttctctgggccaaagcttcgtccgcgatgtgcttttccccagcctctgaatagtaacttgcttgtgcttttcagtctgtccttgaggaaatacactgctacgagcctcagctcaacaggctgaaagagaaagctcagcagctgtgggaaggacaagctgccagcaagagctttaggcacagagtgtcgcagctgtcttctcagtatctagcgctaagcaatttaacaaaggtaacgcctggcacgtgctgtgtgtgagtgtgatactgatgtcgcaaaattggagttgcagcaggttctgcagggtgtgcattgcatcctgacccgcccacagtgtgggtctccaggtcagcagtaaggggcgtgtgtgctgtttccttagccttgcaatctgagttcatcattgttgttgcataagcttgatgtggctctctgaaaaggccgaaggaggtttcaaagattgaggagactttcagtcttcattattgcacaagatattccttttaatactgaaatgatatgtttcccagggctttgatttggaagactcaaatcataaacatgattttttttgttctaaataatcccagagtttttgttctaaataatcccagattaaattactttagaaaaaacatggattctaaacagtttaaattttattagattaaatataatgatatttttaaaaaattcatctgaatctttgcattcattatatagtagtcaaggatgtgttgattgagagtttcagttcagattctagagcagagctcaaaattggcaatggttcagacaactgattaaacctcttttcaaatagcttagaagaaaataaatggaatcctactacaatctcatttagaacattcagccattttgacgtagatggtaacgtagacccattttgaactgtgtgttgcagacctatcttgagctttatgtggcttataacctttgtttcctatgtttttaactttcaggtgttagaatatagggacactggtataatttagtctttaatttggcctcatctgttctgtaagtgtgcatttacagagggtctgctcatttgggtcttcaatacacatcactgaagcagtcacactagcttaggtctgggagtaaatagtctatgtttacacccatttttattctatgattgttattttggatgtttttataaaatctggcacatacctaagttaagataaggaatgaatcatcttagaatgaatgaagaacatctttccattcctttgtatttacttagataccaaaagtaatcgatatatgaatattttgagagctgtagattattcttgcaaagtcttcactgtgttagatataacctataattgataaacaaaaccatgtgtatggtcccatgttttaaaatttagagatattacaaaaatctcagattattttttttttagaactctggctacaatgtaggtcatgtgggttgttgtgtcaggtgagcctaatgtgatatgtgaaaactagaaactactttgaccagtctcccagacaaggcattagggagaaattttactgatttaaaataatcatgatagtcataaagaattggagaggcataaaattgtaacttttttttttgcttttgacccagttattctaatagttttatgatttagaaagatctttaacatatctcatagatttaggccagacttgcctcgtatctgtgcagcgtatgaagccatgactgattgcctttgtttcaaacaaactgttagctttgcaatttgtctctgtgggatggacagctcgaaaaccatttctgtcatttccaggagaaagtgtcaagactggatagaatcgttgcagaacacaatcagttctctcttgggattaaagaattacaagactggatgacggatgcgattcacatgctggattcatactgccacccgacatccgacaaaagtgtgctggacagcaggacgctcaagctcgaggtgtgcatctttacacagaaatatctccaacctacagaatttgtttttctcaaaatttcccgtctccatccacctggggtgatgatgtcacattctctccatgataaatctcagatgctttgtgagtgcaacgctgtctgccttgggtgcacatgccagagaattcctgaatcatctgaccccggatgttttccaaaaaataaaataaaataaagcccgaatgtgattacttgtgtgatcacttgttaagaggctagttttaaatgagatcacagacatattcattatgggaaaatattttgaggaaacattttatagggcaaaacattttccatctttttccactcacttgtcttcctgtatttagccaattctcctcccatcccaagttatgagttcattttcgcatttgtgaagaaaataatgagtctgcattcatttgtatactgggtgccttctaggagaccggcactctgtcttgacaccaaggaatcaaaggtgaataacatagtctttttcctcaggggttttactgtctgaagttggaggtcgaaatatagaagacaacaaccacagatgcagatgtatttatggtgttatagacatacacaggagtggaaccgtgcagaagggatggggttgaaagttgggagagatttcttaggaagtgtgataggtaacccgagttgtgtggggtttaaatttttttttttaataaaattaagacagagtcttgccttcttgcttaggctggtcttgaactcctgaactcaagcaatcttcttgccttggcctcccaaagtactgggattacaggtgtgagccactgcgccctgctataaaccaagtttttgttctgtttttggtttttgttttgttttattttagacggagttttgctcttgttgcccaggctggagtgcaatggtgtgatctcagctcaccgcaacctctgcctcctgggttcaagcgattctcctgcctcagcctcccaagtagctgggattacaggcatgcaccaccacgcctggctaattttgtatttttagtagagacggggtttctccatgttggtcaggctggtctcgaactcccgacctcaggtgacctgcccaccttggcctcccaaagtgctgggattacagggtgagccaccgcgtccgggcaaaaccaagtttttaagaatgatagggagaattattttggcaaagataactgggtggagacttgggaatggtggcagagaggggaaaagtgtgaggaacagccagaggaaagaacagcgtagtgtgtgagaaatttctaccagttgcttattgccacagcagaaactggtggcaatgggtggctgaagctgaggctttggaagttggcaagaaccacattataaaaagagatgaagctttgtcttttaggcaacattatcagttttataacttggaattaaaacttccttctggccgggcgcagtggcttacacttacaatcccagcactttgggaggctgaagtgggaggattgcttgagcctaggagttcaacaccaggctgggcatcgacctcacctttacaaaaaaaaaaaaacatttaaattagctggccatggcagcatatgcctgtagtcccagctaccaaggaggctgagctagaaggatcgcttgatcccaggggtttgaggctgcagtgaactatgattacaccactgcactgaagcctgggagagaaagatagactctgtctctaaaaaaagcaaaagaagaaacttccttctcacatagaaaaagaatagtacttatgaagaacatgaaatatataatctatttctatgggtttttttggttatagagaccataacatttataagctcttcatcctataacctttgagaaatcatgaattctactgtactatatttttcccttgttaaaaccagtaaagtaaaacttcattggaaggaagggattattcagagaagactgcagaccttcaacaccaaggccacttagtaaaaaccagcgggtagctggtgactggcattcaccagcaagccacttccccaccctctgtctcagccgactgggagctccagggctgggcacaattgcatattattctgtgatctttaggagctctgcaatatttaaagccagcaatgttaaacatacaaatgacaaaggacttctgtatgtgttttcacaggctctattatcagtcaaacaggaaaaagagattcagatgaaaatgatagtgaccaggggagaatctgtccttcagaatacttctccagaaggcattcccactattcagcagcagctgcagagtgtgaaggatatgtgggcatcccttttgtctgcagggattcgttgtaaaaggtgagggaaactacagccaagcactggggaagctattactaaaagatcaatataatactactgaacagaccattcctgtggccggcttcccttcccttccctttcctttccttcctcccttccttccttccttccttccttccttccttccttccttcctccttcctccttcctccttccctccctcactccctttcctttcttccttccttccccctgttttctcttgattcctctttctttttctttcttttttcttattagaacaaaagaaactggcagatgtaatctcacatttagattgacctgaatactgtgccaatgtggtaatataactaaaaatgcatgtttctttttgttgttgttgctaacataaaaatacaaaaaaaaaaagattcataatgtaaaaatataaggattaaaaccaagtagtggacttgggaggtaaacccaggaaatacaaatagaggagtgggaaagaaatggcaggcagggggagggcagtaagtaaagggtgttgtattagcccgttctcactctgctaggaagacattcctgagattgggtaatttataaaggaaagaggtttaattgactcccaattcctcatggctggggaggcctcaggaaacttacaatcgtggcggaaggggaagcaaacacatccttcttcgcatggcagcaagagagacaagtgctgagcaaaaggggaaaagccccttataaaatcatcagatctcatgaacactcactgactatcacgagaacagcatgggggaaaccacccccatgattcaattacctcccattgggtccctcccatgacatgtggggattatgggaactacaattcaagatgatatttgggtggggacacagagcttaaccatatcaggtatgttatcaagcgagttgcccaccgttgtgagcaactgcaacttaatccagtcaggcaatgctgggagctggtatacagtgtgagccccagttatcccatccaagggcaggggatctggagtatttagagacaaactcatatgaattagaagagcagttgagggctgcccctcagggtgaggctcccctgtgcctatattgccctcaaactgagagtacatcaggggctagagaatgtcttcaagctaagagatctaggagcaattagaagtccaactggactgtgctgcagtggtgtgatccgggggtgtggatggatggagcacttacagtgtctgctacaaaaggacccaaaacctggtagtacaattaggcagaaatgattaatggaatttatttatttttatatttatttatttatttatttatttatttagtttgagacggagtcttgctctgtcgcccaggctccagtgcagtggcacgatctcggctcactgcgagctccgcctcccgggttcacgccattctcctgcctcagcctctcgagtagctggtactacaggcgcccgccaccatgcccggctaattttttgtatttttagtagagacggggtttcactgtgttagccaggatggccttgatctcctgacctcgtgatccacccgccttggcctcccaaagtgctgggattacaggcgtgagtcaccgcgcccggcctgattaatgaaatttaaaatatagcatgtgtaggccgggtgtggtggctcacgcctgtattcccagcactttgggaggccgaggcaggcagatcacaaggtcaggagatcaagaccatcctggctaacacagtgaaaccctgtctctaccaaaagtacaaaaaaattagccgggcatggtggcgggggcatgtagtcccagctactcgggcggctgaggaaggagaatggcgtgaacccgggaggcagagcttgcagtgagccgagatcgcgccactgcactccagcctgggtgagacggccaagactttgtcttaaaaaaaaaaaactagcatgtgtattgagacaagggaagtgcttaacttatcgataaaagaaataattaagttttactatttagaccaagtcaggaaatattgtccttttatttcattacgattttctgatatttaatctcacgtaaggtggttactgttcttacttttctctcctgctctcaatgtcctgctcggtttgatagagttaagtgttgcttctctccctgcccagagctttggctccagaaaagacccactcaggggatctctctcagttttgcctttgaggctcccccagtgtctcgtgtccccccagccgctgactcttgagttgatagctagttccatgtttctgcatattggcctgggtttaaatgttccttgcttcctgaggctgcccttcagacctggactcagtgtccttaagccctgggcagcctgctcactcccaagcaagcttcttcctgatctcttgaccccttgcttactggagtggatggagcagacacaatgacattttagactcctaaggattctcaatgtggatttattgtcctttcaaatccctttcagccaactcgaaggagctctctccaagtggacaagttatcaggatggcgttcgacagttctccggttggatggatagtatggaagccaacctgaatgaatcagaaaggcagcatgcggagctgcgggataaaacaacgatgctcggaaaagccaaggtgagagctggatttcagattccatgtgttttctcacaggcttctttagaatgccacagtcagacaaaaatgggattacgtgtaccctagggcagtgcacataagcaaattacgtttggggcttttagtataatctctaaaggcttcttaaactggactttcatttgtgattactttattagtgagtgaaaattttcccttccaggaaaaccatgtagatccatgttttatgatacaaaccatttaaaatgtagcaccatgaaatatcttttaatgtcttcagcctgctcatcattaggaagtcttccttttttttttttttttatcacatccctttgtgttatcttttgtgcattcgtcataatgcttacattagtacagtactacatggaaagatttttttaaataaataaataatggcatgttcttaaaacttattggcagtagtattcaaacatgaagttttacagtcctttggtttatagctgcagcctcactccagggcatgatcattggtcagcctgttccatcacccccttaccattatcctaaacagcacttgtgatcttctacacagaaatcctttaacctctcacattctctattcctgctcatttgtatcacctcaccctgaatatattacattggaaacctcattattctcagtgccttctttctcattgccactttgcatctggcactaggtcctactgatccatcctcttcacctgaactggaacagactcctaatttttcaccttgtttcttgcctccatctattgttatctcctataaagatgaatgtctcacttcctgcctgaggtcctgtgttggcttcccattgtctacaggataagctcaatctccgtcacctggtttgtaagaatggaaataaactcctctgccatgctcctttccttcatgctcccagcctcctcccttgcgctctccagccttgctgaatctcacactatctcctgaacatgccacaatcttcacaattctgtgtctttgcataatctcttctctttttacagaaggtccttgctctgtctctgcccctggcaacctcctacttatctttctgaatgaattttgaagtcattttagctatgctacaccaccaccgctcaggcttgattcattgttctgttctctcatagcccttggttcaaagctctttatcaatttcatatatatttgcatgtccctctccttcagtgaatagagatgcttaattttctttatatcctcaacacttggctctctgtctgacacagaacacacgctgaataaaagttatttaaatgactaaatgatcttatgtgacctatgccaaggtacttaatgtttctgggtctcatttatgcatccataaaataatataattataattatctgcttcataaatacctgcatgtattatctgttataataattaattgcttaattaattggattgttcatctattcaatcaacatttattgagaaattgctacatgtagggactgtgcccgattctagcagtaaaaacagtcaagcgtatgttagtggggatgcatgcactcagtaataaatgtacaaataaataattttaactgctgaatactatgaagaaaaaaaaagtagtgtggtgtgagagagaatcattttgaaaaggctcatacagcttgtttgaggccaagggagagggacaggaaaggcctctctgaaacagcagacatatagtccatgcactaaagaatttaagccagagaaatgagcctggggaggagttgaggaaccagcattccggatagaataaaaagcaggtcctcgggccctgtggagggaaatatcctggtgcagtggggagctgtgaggaaacaggcaggtgttgttgcagcagagagtaggcagggaggggctgcaaggggagtttgatggagagacagagcctgatcctccattgccatgccagctgctctgaggattttccacttgatcccggcagcattgggacgataatccaggttttaagctgagaagcgacacgattcaacttttaattgcaagacattatatcacttagactgctgtgtggagcatgaaataagggacagggaaagaattggtggccaggaatctgcctgggataccactgcaaagtccaagtgaaagaggagggcagcctgggctggggagtttgcaggagatgtggggacagatgtcgcagtataataggaggtagagctaacaggatttcctaatggttaagaggacggagagctagagaggacgctggaacaattcccatgttctgggttgaccgtctgggtgggaggtcatggcatttgctgtttgaaaagagatggaaagagaagggggcttcatgggggctggggtagaatagggatagggtgaacatcaggggtccatttctggacataatcagtttgaaatgttaagagtagaaatataaagtagttaattggtaattcatatgttagagaaagttctggaccagacataaaatacacacacacacacacacacacacccatgcattcacacacatatctgtgtcaaatagataaaatgatggaggagtggacgaataaataacctgaggtcacttgtcaactgtacaattaaaatatcttgattttagcagtgtcgttgatgtgatggtgcatgaatggccactttatttttcttaaatgctctctagttattaaatgaagaagtgctgagttacagcagcttgctggagaccatcgaagtcaaaggggctggcatgacagaacactatgtcacccagctagaactccaggatctacaggaacgatacagagccatccaagagagggccaaggtacggcaaagcactttccttgtagactcaccaaaaggggagtgtttggagctgtgctcctttaaagactcatttatgttcaagaatgacaggcttgggaaaacagaacaaaagcaaaatgaatttttaatattttaaaggaattactggcaaaatcaaaaaccttcaaatattgttagtattatgaaagctatgaaagtaagataattttcaactaaaaattcctagaaaggtaccaacttaaaaaaaattctggacaccttcaattgaagactcataaatgccttattatgtctgatgatgagagttttctaaggtgggaaataatcactgatagtattaatcattcttcatttagtcctcacaaagaaaataaatatgctttttcagagcgcattctactatggaaaatttaatccacagtacgtccaaatcttcatttaaggcacaatataagaatttcaattttcttcattagcaaaagtgaatttttatgaaattagtaaagtgaattcatttcttagcctgttacattttataaggtgttcagagatcatgtagttaattcaacaaaataattaatgacacttttattcctgaaatattaggtttttatatttttacataaatattgaagattcatgattctaggaaataactcatattctaatgtctcaataattatacttttctaaaattacaaaagtgaattacagcacactgatgctttataaagtaatgtgttcctaacttcattattttaaatgctaattataggaagccgtaaccaagtctgaaaaacttgtccgcctgcaccaagagtatcagagagacctaaaggcatttgaagtttggttggggcaagaacaagaaaagctcgaccagtattcagttcttgaaggtgatgcccacactcatgagacaacattgcgtgatcttcaggtaaggcctcctttatcctaaaacaaaggaatcttcattctgaatatggaattattattttaggcaataggaagttaatagaaaccttgagtccagtggctagttgatacacattaagtgcaatccccataaggtttgatcaagaacattctgagacctcagcagtatgcgctagttgacatcattttgtaggcaatttaggtaggacaggactagcacttgggggattcatggagctgctagggtggccctgacaaatggctggagatctaattgatggggttttctggcttacctgcctgtttctccctaagggatcacatcagatctgggggacagcggcagaagtcattagaaggtgacacaaagtcaaactagtggcaatatcttgaaccatgtagttttaagcaaaacctgccacattgctgatggtaccggttcgggctcagagttctagaagaaggaattacagaagtaaaaaaaaataagtgttagtgcccaggccagcgggccataattcacggtgagatgccagacatggtggagaaagtggtcacaatctatatacttatttactcattcagtatttactggatacttaatacagtacagatactttgctagctacttcaggcaaagatgattaagatatgatttctgtcttcaagaaacttgaaatctgatgaggaacacaaacccatagaaagatgattataaataatatggcgaggacattagtagactaatgtaaggggtcttatggtagcatcaaagaagggcccataaacttaccttaaggaataggtaggaatcaaggaagttcaccaagaaggggccaccatgtacaaaacaaacagcagaagatggaggaaggccaatgagaccactttatgtcccaccagtgatgtgttggaacttacaaatgtgccatcagtcctgatcagagttggttcaggattgggtaagttttacctacagcttgaacaaggtgggaaaatcagggaccatcatgattatcagtcacatataaaatttctggctttttctactagttcttggaaattgtataatggcaagagaatggggttgggattgggaagttgggactctaatccttgatgggacccaacactaggtgacttcaggcaagagacaacttctctgacccaatttcatccacagagttgtaaggattaaccgaaatggaagaaaatcttatttaaatatacggtctactcatgaagtaagtaaatactaaaagttagaagggtcacaatttccttagcttacttaagggtctcatccatcctgcctccaaagagtaggatccacaggtttagctgttgtaatttatttgactagaattgactattttctttacataacccttcttagttctacactaccaacatcactggtaagcaaatgctgagctccctgtgcttttgtgtagaactaagtcaatagttacccatcaccagcagatgttgctgttgctctggtcaaaagaaaatatttcacttaagccggtattcgtgtggtgcaaacctaacctccccctgatttcaccatgcattaattcttacattttctattgtgagccaccacaaaggttaaaaaagaaggaagatgctagtggcaggaagcagtggtggagaattgtgatgctgcaaccacaaagcagaatttcttcaggatcctgatgttctgtagcatgtacatggtgtagggattggccagtaatgtggaacatattcagaaattattttgtataacctgaaggcctagtttgggtcatagaacatatatatagtttatatatttttaatataatatctttaatatattaatatatattaatatattatatacacacatttatgttacttatagattttatatatttaacaatattatatatatatttatttaaatattgaactattttttccttcagaatacagacttgaaatttgggatatatgagaatttatttaatagaatattaacttggataatagataaagtggttacttatgaactatggaaaagatgttgagaagattaatagattagtcaactactgtccagggccacagtgtctgtatttttaaataaaatattattggaatgcagccacacccatttatttatgtatcgtctgtggtttttttcatactacaatggcagagttaagtcattgcaacagagacctatggcccacaagatccaaattatttactatcaggcctttcatagaaaaagtttgccaaccttgaattaggaaaataattataaaaaattatcttgaaaaaaagtctaagaattttagaataaagtttatgtatttgttgccaatttgattaatattttaccatgtatatctatagttcttctccttccatgtgcatatgtctttacattatactgtgcttgaagtgacatcatatttgaagaaaaattttctattagttgaaaccatgtgagaatgttatttttgtaagaaaaatattttagcaatcttaagtggtttttaaaatatagtattgagaaatactatgttttaactacatatactgatatttttaacattgttgatgggatttgacttgatttattttactttgggtgatcagatcaagtgacagtatagatttatgtttatcaccagaaatataagtgtgccatgttgttttaccaatatctttaaggatataagattctttttgtcctataaaaatagcatatgctcttcaaaacttgatttatactaaatttgtagggtaaatctttggggtttaggctttggtggaggaaatttatttgcacctcagagcacctggtgggcaggtgtgatgaaccaatttcccaagtttgtgtgccctgcactctccagtttcaaattttcttggccaccacaatgcctagagtacagctttggcaaaagattcctccttaggaagcagaaggttcattgtttctttctcagtcacaaatgtagcactgagctattcaatgtcaaagcaagaagcttaagtcactttaagcagattatgagctataataagcctaggtcattcttttaaacaatagccctttattcacaagtgtttttgcctgttagctaaaaagtcaaatttgggaaactgttgattgagaaaaatattggggtgtgtgtgtgtgtatgttgattattttaattgaaaaagttttaggaatccttctgacttcggagaaaatatggttagggacatatttttgtatagggcataataataaaatcatttttttctaatgagaagttcaagtgggcacagttggcttgggcaagacatgctaacccatgcaagtgtgaaatatgattgagagtgacagccatacctttttctctgcaggagctacaggtacactgtgcagaggggcaggccctgttgaactcagtgctgcacaccagagaggatgtgatcccatcaggtatcccacaggcagaggaccgggctttagagtctctccggcaagactggcaggcttaccagcacaggctgtccgagactcgaactcagttcaataacgtggtgaacaaattgaggctaatggagcaaaagtttcagcaagtagatgaatggctcaaaacagcagaggagaaagttagtcccaggaccagacgtcagtctaacagggcaaccaaggagatacaattacatcagatgaaggtacaactcatgtagattcctgatctttgtcaaagctacagttaccttgcatagtttgtttcattaagatatttagtaacttttatccaaagcttaggctttgcaaaatctttttgattacctagaaagttaaaataaatcacaatggagcattcctcttacagcaattatttcataaattagtctttgatacaaggtagtttaatgtaaccattttatattttctttccataccctattaccttgttttgtgaagatacatgaatgcttgtattacaataatttaagtttatggttctgatatgaaattgctccaatatagttcattgaaatagtacttgagaattagttttattctaagttttatgcaattttagtgcacacatctaaaataatgcttgagccttaggaatttattttcattatccacccattttaaaattgatctaggtacaataggaggtctaaaaaattatgccactttgttttcatgtttatttattttatttaatttttttggagacagagtcttgctctgtcgcccaagctggagtgcagtggtgcggtctcagctcactgtaacctctgtagcctgggttcaagcgattctcctgcctcagcctcccaagcagctgggactacaggcgtgagccaccgcacctggcctgttttcatttttaatttttgaattgaagtgtaatagatacagaaaactatccaactcaagtgtacagtttgtatcacattgttgtaatataatatttatgaagataacatatggcattttcaaaattaaatctcaaaataaacatcttctaaacctacactgaaaccatttcctataagaagatatacatttggcttattcgaatggctaagattgaatctttcccttcgatactttgtcatttcagaagtggcacgaagaagtgactgcatacagagatgaagttgaggaagtgggagctagagctcaggagatactggacgagagccacgtgaacagcagaatgggttgccaggccacccagctgacttccagataccaggccctgcttctccaagtgctggtgagtgggtcaccaggtgctcagcatagaccagcaaacttcgccagccaaaatagccttcctttcactaacatccagtgaagatacatattcatcaacaaaggccctggcacaggcctttacttcaccattcaattttctcttttctttcataggaacaaataaaattcctggaggaggagattcagagtttggaggaatcagaatcatccctcagttcctattctgattggtatggctctactcataaaaacttcaagaatgtggctaccaagattgacaaagtagatacagtaatgatggggaagaaattgaagacgttggaggtaggcacgcatacttcagatttgtatccaacctttccgttcaccaagctgccccattctcctgcatagatactggaaacacaggtgatcatcccaaccattatgattggtgatcctgagctcatcattttacttgaaatactaagttggctccttaaggccaaaagctagctttcacttattgatgatgtgttgttatcagaatgacttacacatggacacccatgaaagtcttcactgaattccagtgtgacacttcaatattaagagaaaactttctctctcaaattaatggcccagtgcttgtaaagagtttaaactcaggtctttagaaggagattgctaaggatgagagaaacatcaagttctttttcaagtctctgatttggaaatgatatattgatcaagacttttagaacctatattgaaataaagaagccaaggttcctgattcctggcacgtcaaatctggttatgaatgtcaacaacttattttaaagggaaataggtggacttaaaaacaggccttgagaaacctttctttaaaaggaaaagaaatggccaggcacagtggctcacacctgtaatcccagcactttgggaggctgaggtgggtggattgcttgaggtcagaagttcaagaccagcctgacccacatggtgaaaccctgtctctactaaaaaatacaaaaattagctgggcatggtggcacgcacctgtagtcccagctactttggaggctgaggcaggagaatcgctggaacccaggaggcggaagttgcagtgagccaagattgtgccactgcactctagcctgggtgacaaagtgaaactccatctcaaaaaaaaaaaagaaagaaaagaaaagaaacaagactacctttgctcctactcactctctttttcaggttttgctcaaagacatggagaaaggtcacagtttgctgaaatcagcccgggagaaaggagagagggctgttaaatacttggaggaaggcgaggcagagaggttaagaaaggagattcatgatcacatggagcagttgaaggaactgaccagcactgtccggaaagaacacatgacgctggaaaaaggtcttcatttagcaaaggaattctcagataaatgcaaagcactgacacagtggatagcagaataccaggaaattctacatgttcctgaagaacccaaaatggaattatatgagaaaaaagctcagttatctaaatacaaggtagtgtgtttactcattgacagatgcatgcagaggtcacacagagaccaaatgggagggaggtgattcttgctgggtgtcacccgtaacagctgctggaatgcatcccgcatgtgtccgttctgcagctgaccagtgatgccatgacctatggagatttattgggttaaatccactacctcagagttatttttgcattcagagatctgatactcaaagattgtatcaatatatttattgattgtacgtatctgtcaatcaatgaagaccttttctgatgcgtgagccaggtatttggatcctccaggtaaaatcttgctggcatcaggatcccatatctttcccatattgaggcttcccttcatcttctggtacctaaggctagaaactgacctatggtaaattgaaaatgacatatcatatttataagaaaataagttctagttaacaaactcgagctaagttccttagaaactgatttttgaaagaataaatagtgatgtggctatagctatacatgacatagacacaggtacttcacccactcaaatttttgaagcaattatgcaagcttatatgtggaataatttgtgttataaatttgatctggatgattgagtggtaccttttaaggattacagtgtgctggcttaccccaaagctttccctgttggaagcttctgtgacggcctcttccagccaatgtctatttctatccttggcttctctgccaagcccgacaacttgtctttgaagaggccatataagaatcacaacctcttcctcctggccactgagttcttgatagatttaaatagtgcctttagcctatctcagcaaggtcacaactggaattgttctttctaactccataaatagctcaaactggaactaacttcatgaactcaaaatcaaaagatagtggcctttttatgttgagattttttttctctgatgaaaggaataaggtagaagccagaaatataaactatatttaatttagacaaatataactatttcccatccttttatctccacataggaagggccatttgatgtgtgactctgctgttgtatttagaaactgtattcgtcttaataaatcactctctctttaatgtcttgcacctattgcttcataaatatgaacaatctttctttgaggtagatcatctcttgcataccatgggaatatgtatgtattcatcttgtccacggagatgagcaggctcatttttttttctttgtaattcaagtcacttcaacaaacggtgctgtcccatgaaccatcagtaaagtcagtgagagagaagggtgaagctcttttggaactggtgcaggacgtcactttaaaggacaaaatagatcaacttcaaagtgattaccaggacctgtgcagcataggaaaggtaaggagagatgaaagactccgtaaaagggtttattttccaaaatgtgggccctgactcctttctctctgtcatgtaattttaaggcctggtacgggttagtatttttttttattcagatggatatttaattggcataatgactatgttgttttccattcctggtagttttctaagtagctctaactaccctgtgagttgcactgggtttttgtaatacaaaacagttttgagtaggtttttcacttgaaagtcatctctgatggacacctggttttgcaggagcatgtcttcagtctggaggcgaaagtcaaagaccatgaagactacaacagtgagctccaagaggtcgaaaagtggctgctgcagatgtctggcagactggtggcacctgacctcctggagacaagcagcctggagacaatcacccagcaattggcccaccacaaggtacccctgacctttaaagggctgcctttgggatggcttcaccagtgtgtgtacgcatgtgtctgtgcatgtgtgtgcatgtgtgggggtgcacacacaggtgcatctctggtttataatgattgtactgagagaatcaggtctgtattagtccgttttcacatggctgaaaaagacatacctgagactgggcaatttacaaaagaaagaggtttgttggacttacagttccttgtggctggggaggcctcaaaatcacagtgaaaggttaaggcacatctcacatggcagcagacaacagaagagagcatttccagggaaactcccctttttaaaaccatcagatctcatgagacttatttgctatcatgagaacagcacaggaaagagctgtccccatgattcagttatctcctaccaggtcccttctacaacacgtaggaattcaagatgagatttgggtggggagacagccaaaccatatgaaggtctgagtctcaagcacttctgacaattgacaacaattgaacttgatattcaagtgaatcaagaagagttgaatcctcgcgttgaacttctgaacacattgctgcatttcccccagctaataatttttatctcagaatttagtctttatggaatctattttagaaaatgcagccaaaggcatcagaaagtctggattctaggctggactcttccccttcctggagagacaacttagcctatctgagtctgtcctttctcctttaggatgataacaataccagcccatctcataattgttgtgctaatcacaggagataatatttgtgaagacattttgtaaatcacaaagtacaaaactaatatgaggagttcttatctttgatataggtgataggctaaaagcactatttaaatctatcaagataagaacttaataatatgtatttttagtaatcgtgtttaccacgtgatagacgttatggtcacaatttcatggagcaactgatttgtgatcttaatggaaaacaagtttactcatcatgtggtcagtgtctgacagtgcgtcttaggaaagccagttagcccctctgggctgcaacatttctgtctataagaaaggattttatttaacaaatatgaataaaaaagtagctacacaataccttctggtaggcactgaggagatgacaatccagaaggtagtctaccccatgaatggcctcatgatggagtggttctgttccaactcagagacagagtggttcttttcaactgagcatatatgataactgctagcccagcgctgtttgtagaccctggactgctgaagggccacccaggtttcctatagatataatgatgggttacccaggctaccctatgttggattgtgtcacttgtcattagcatcatataacaggaaaaaaaaaaaacactagaacttgattttatttatttatgtatttatttatttttattttattttatttttttgagacagagttttgctcttgttgcccaggctggagtgcaatggtgcaacctcagctcactgtaacctctgcctcctgggttcaagcgattcttctgcctcagcctcccaagtagctgagattataggtgccctccaccatgcccgactaacttttgtatttttagtagagacagggttacaccatgttggccaggctggtctctaactcctgacctcaggtgatccaccagtctcagcctcccaaaatgctgggattacaggcgtgagccaccgcgtctggccagaacgtgatttttaaaaaataagttattcttccctgagtcatctataagaatgctcactaaagaatgcaagtggacatggtggtgtgaggtgaaatcaggccgagctgtgtctaaagcctgggggctgtgccataccttgactgtgttgtacaacctcactgtgattcagtttcctcatctataaaacaatgataatacacattcgtcaggcttatatataattcctggactatagcaggtacttaataaatgataagtttaaatgctattttcattattataaacagtagtagatgtaagttagatattacaagaattaaaaattagatattacattattacagaaactagaattagattattatattcgtgcaaaagtaattgcagtttttgccattaaaagtaataacaggccgggcgtggtggctcacacttgtaatccaagcactttgggaggccgaggccagcagatcacttgaggtcaggagttcaagaccagctggccaacatggtaaaactccatctctactaaaaatacaaaaaaaaaaaaaaattagccaggtgtggtggtgggcacctgtgatcccacctactcaggaggctgaggcaggagaattgctagaacctgggaggtggaggttgcagtaagctgaaattgcgccactgcactccagcctgggcagcagagtgacactctgtcttaaaaaaaaaaaaaaaagaatgacaaaaaacacaactacttttgcaccaaccttatagaaataagatattatataaagttgatgaaatagtaattagattgttttagataaaaattatgccagaattataacttattaacctgaaaaatatagggacatctttttgtctggtaataataccatggagtattatctctctgagaccagccatgaacacattctagtgttaaaggttacttcatcattccttatgtaactaatctcttaaactcattgactcttcctcttggagtatccctgaaaacatacatgtgcttttgttttcatttaatatataactaaggtaaattgcaagattctttcaaaaacaatattaaacagtgaaataatctatcttaaactttgatggataagttacttaaaagtagaattctgaaaactctgtattggtttcacttttgcaggcaatgatggaagaaattgctggttttgaagaccgtttgaacaatcttcaaatgaaaggtgatactttgattggccaatgtgcagaccacctgcaagcgaaacttaaacaaaacgtgcatgctcatctgcagggcacaaaggacagctactcagcgatctgcagcacagctcagagggtgagtgcccccagaacattccacagtgacaaggaattatggggagaggctgtgcagtctagagactttttacaaatagaatcgatgctcaaatctttggattcgttttggtgtgttgccagacaggaaatacgaggataaatttcacagttgctatgtgaacacaaaactaacatattttgtatttgattgatgtgactaagcagtgaatttcagatattggtttttttgttttgttttgttttgtttgagacggagtctcactctgtcgcacaggctggagtgcagtggcgcgatctcggctcactgcaagctccgcctcccaggttcacgccattctcctacttcagcctcccgagtagctgggactacaggcgcccgccaccacgcctggctaattttttgtatttttagtagagacggggtttcaccgtgttagccaggatggtttcgatctcctgacctcgtgatccgcccacctctgcctcccaacgtgctgggattacaggtgtgagcgaatttcagatattgttttatccaatttgtttattccatgaattgattgtgaaaaggtttgttaaaagttgatttgggccgggcatggtggctcaagcctataatcccagcactttgggaggccaaagcaggtgaatcacttgaggtcaggagcttgagaccagcctggccaacatggtgaaaccccgtcttcactaaaaatacaaaaattacctgggcgtggtggcaagcacctgtaatccccgctactccggaggctgaggcagcagaatcgcttgaacgtgggaggcagagattgcagtgagccgagatcgcgccactgcactccagcctgggggacaaagtgagactccgtctaaataaaaataaataaataaagttaatttgtttgttggtaaaaggaatttgaggaaatttaaaaaagaaaaaaatagttgatgtgtttgaatagaggatgtgtttttctttgcacacgatcaatactttctaattttccatttattttgtaacacaaaagtaaatttatttcatatttttcacaataattattttctttttaactgtatgcagcctgggttctaatctaaatcaatatttgtttgcattcatatagaatttgagaaacgagtaactgacaaatatgacttacacttaagtgggtgtacttccactaaaacagaattcttaatgttttagaaataagtgtaagaggggtaagaatggctattttaacaaaaacttactaaaataggtaaattgctttctattattctagaatttttaaatgacactaaaaagagtttttataagcctttaaacttagtattctgtgtatttttgtttactggactagccagtaagaactgatgatataccagtgacgtggttagagtggtccatgttcaccataataataaaaaaaattctgagtgacattagtaacttcctagacttaaaaaaaaaaattcaccttcaaaggttaacaaaaagaactggtgatacatcagtgatgtggttagaatggtccgtgttcaccataataataaaaaaaattctgggtgacattagtcaacttcctagacttaaaaaaaaatcaccttcaaaggttaacaaaagaggactacaagaatctaataaataattgaaaatgatgacaaggggagaaaagggggagtgaagagagaaaatgaggctacacatagaactttctggtgagttcattcgttcactcattcaacagagatttcttgcacactgtcttccttcacagtggacattttctttgtattagggatacagtttaatttgttttaattggtggatgttggaaaagccaacataatttttaaaatttaaaaagtggatgaaattctaagaacataatcagaacttcataattaaagtttgcaaaagtgataaagagaacaaaacaccattcttttaaaaattctgcttggaataagaataaataagggataaacccaatgtcagacgaaagtgatgaatttaaaagatgacagagaaaagcagaattcaatgattgcttctattgtctcaataatgaaagaaatgccaggttaaactaatttccttcttttttcctttttcctaaatggaaacatcccagatatattttctcttgatctcaaatagacacataatttttcttaatatgtcttatggataaaatgaaaattggttggcttgttaaggattaattaattaaatagacatatcagaaaatgtatgaattattctggattatttttgccctggaacataacttctaagatgaagtgaggacatccacctctccactcctcatgttataatttagttcaaattttaccctatctctattgcagaagcatctcagttagagaaacattggttatctttttttgagatcattttttatttttacttttagttgctagcttaaacaaaaagtgcaatatttataccataggaagagaagctgcaaaaacctctgacttatgtttatgacaattaacttcaatgattttatgtattctagcatgcctctacggttatatttaccctgctcatgttctcttcccctaatccggatattacactgtgatgtgtggtccgagaagttatcaactggggtataggcattgcattttgcaacatctggggagacatacaactgccttagatattagatgaaattgcagaatcttggggggaaaatccatttagatgtactggtcatgtttcattgaatttgaatgatctttatagaggtagaaagcagttctcataatctcagcatgattgtattgtctcagatgtaccagagtttggaacacgaacttcagaagcacgtcagccgacaagacaccctgcagcagtgccaggcctggctttctgcagtccagccggatttagagccaagtcctcaaccacctcttagtagggcagaagccattaagcaggtagtaaactcctgaaagtttgtgttattcttgtgaatcattcagagcgtcagtgaaaatgtgtgaagtacctatgatgtgccaaactgtattgactcctgggaatctaaaagtaggaagaaggtctgaggttggctctagtggagttcatgtgccagccagaagatggacatgatactgaggggccaacttggtagactagaaagagaatggggccaggcgtagtggctcatgcctgcaatcccagcactttgggaggccaaaacgggcgaatcacttgaggccaggagctcgagaccagcctggccaacatggtgaaaccccatctctactaaaaatataaacattagctgggcatggtgacgtgcacctgtaatcccagctaccctgggattgaggtagcagggtacctacccgcctgaggctgaggaggctgaggcaggagaatcgcttgaacctgggaggcagaggttgcagtgagccgagatcatgccactgcactccagctttggtgacagaacaagactctgtcttgaaaaattaaaaaataaaaataaaaaataaaataaaagaataatgaaaataaactattaaaaagaaaaaaaaaaaagaaagagaatggggccgggcatagtggctcatgcctgtaatcccaacactttgagaggccaaggcgggccgaccacacagtttcaagagtgcaagaccatcctggccaacatggtgaaacctcatctctactaaaaatacacaaattagctgggcatggtggcaggcgcctgtaatcctagctattcaggaagctgaagcacgaaaattgcttgaacctgggaggtggaggcggaggttgcagtgagccaagattgcgccactgcactccagcctgggcaccagagtgagactctgtctcaaaaaaaaaaaaaagaaaagaaaacgaaagaaagagaatgggcactgtaaccaaagattaattctaatatttattctgttgggggaccatgggtaagtcgcttaatttctccaagccttcgagatagtttcctactatcaaaagtgacatttataagtatacttacttctaaaagttataatgaaatgcaaatatcacactacagataaacgtgatttataaacagaaaagtaatactagcttcttgcatagttttggggcaaaaacaaggtgcttcatagataattattgaatggatgatgaatgaaatgttagtttttatcatgtgaagggaattctattccatattaatttgacatccacatgctgaaaatgttattgctgagacttaatcagaatatgtgggaaatattttttttaaacttttgtactaagcagcttttgtatgcagtgttgactccgtgggaaaatattttagaggaatttagttataaaggttattgctgccagatacgaattaacagtatttaataatttaattttttagcacaaattagaatagcataatgtatttgatcactgagtccacataaagaatgtgtctagttaatttgtcccccgaagtatactttctaaaggctaaaatgatttacattgtcattcaatggttcacaaaagtgttcatattttactttataagaatagaatcaggacaaatgaaacatagttctccttgaatcaagaaaaatgaattaaagactgcctatattctacttttttattagactgtgagtttccttgacccacaagccaccttgtcttgtggctgtttgtttccaatgcactttattcagaacaattcagaccaacacttaatctttctcctctgttaccaaaaaagaaataaaagagataaagggagaagaaagtattaatggcagtgatgttttgctagagcaggaagagatttcctacacataccagagtaagccgtggtcacaggaggatactgatccttcttccagattacgtgactgtatggttccttgtttctgcctctttcacatgtctctcaaaatggtctttggaagtagccagagaagggagttcgaggtggtggagacacttggactacagtcactctgaggaggaaaggttttttattttgttccctttttttattttttattttttgttgttatttcttttgttttagtttttcccttggcaagtgcaataagtcctcacttaattccatcggtaggtcttagaaactgaaactgtaagcaaaaccatgtacagcaggtcctcaaataatgtcatgtccttcaatatgcagctttgttatagcattgatgagaacaaaagttgtttcattatacaacttcctgcttaaagaagtcacggtttccaagaatctgctgacgacattaaatgaggacttactgtgttcatgtaaaattgaccaggcccttagtggctggtgagcttggatatgtgactggagaatccgcttacaatgggcatggtaccaagatgcagtgtgtatccccaacaccacccgtctagtaaacccaataaaccctcaatacatatgtgaagataatacactccccgctgccacaagaaaatggcacatggattcgattccgttcagagtgctatatgtttttagaaggcataaaatgtgaactttagggaatgggaaaaagtactataagatttttctgtaaagttgattttagcaaacatcgtttgcagctgtgtggtcactaacactctatatgctgcttccagtgctttcggaatcagatcaactatataaatcataccatcattcctttcaattaaatatgttcataaaatacaaattctgacaacttattctcttctcatatccaaaagttgtttgagacaaataactttctctgggtcataggtgcatgatgtggtacttgtgcacagtggctgatgactcacaataccatagttcgcttgtacattcaattgaaaaggtgctactcctgacttaatgggaaattgatctgtgtttattatatccacaggaacacagcatgtctaggtaatccacacagtgcagaggaaaaatactcagattggagtcacaaaatcaggcaccatgattgactctatgatttgggaaaatcctggaagtcaactttatccctgcaacttgtagtcaatactgccttccttatttatccctatttatgtagtaatcaagaaccacttcttactacctcagccaccaccccctgtcaggccatcttcatggttcatctgatccctgcagtagcctaacacctggacaccatagctgcctgccacccctgtggcaagccgttctccacgtgatgttcggagggagtctttgaaagcctgtttcagatcatgatgctcccgatattttcccatcacacttaaattccaactttcttaccacggcttatgaacaggctgattatagaatttgttttctcaaatggaaccttcttgataagacagagtctgctttacataatccaatgggactagcgcagtggttcacaactggggtggaggagatggtgactttgctcctacaagggacatttggcactgtctgaacacgttgttggttgttacaactgggagtggtggggacactgctggcattaagtgggtagacgcgaaggatgctgctgacgttctagcaagctataagtcagccccacaacaaagaattatttggagtcaactgtcaatagttctgagttgagaaactctagactagagacaaaacccagcaaattgggatgtatggtcagctctccttgtaaggggctccatgacttgcccccgcccaccctccgacctctgctcacacctgattcactctgctccagcctcagggctttgcatttgctgtctctctacccaccacatccacctgcctggaatgttcttaccttatgccatgccatgcattcaggtcgtttcctcagaggggcctgggagatacactgtccctgaagtggcagtccttcttcctcataccctatctgcttagcaccttgattttcccacatgatatttaaaactactaaacatcccagtgcaagtttgtttatttatatattatttatctccttcctaagaatgtcaactccctgggagcaagggttttgctttatgggctgctctatgcccagtatctaaaatggagcctgagtagaatctgcgcatctgcaaagaaacacatttctttgtttctataaatagattaaagatccacctggagaagcctttcttgggcttgtggaaagagaataatacaagatgaatctcctgcaaagtaaagaagcccagacatctgtgttttaacctcactccaatgaaacctaccaactcacggacctttgccttctgtctctaagatatgcaaaagcatgttaagaggcaggacagcgtaggctacaaattctttctctggaatggaaaataagctggcatgtgagcaaataatctggaaagattatagaagtttcttgcgttttcccctttcccagaccatacagaatactttacttacaaggagaagcaaatggtggacaaataaatccccattggtgatttaaattttttcctgtgagtcactaatatatgtcacttgaacacaatggtgaaaacactgagcatagcaagactatttttgaaatgtcaacagaatattccaaatgatacaagtatttgctatctaaatagctgatgcatctctttcactctgataactgccttttccaggtcaaacacttcagagctttgcaagagcaggcaaggacctacctagatctcctttgctccatgtgtgacctgtcaaatgcttcggtgaaaaccacagcaaaagacattcaacaaacagagcaaacggtaagaaaatgaaaaatcacattgaatttgtttgttttattatattctcttgcttgaatgtttcatgtgagattgaaagaaaatagctcttggcttgttcttgctgtatgtaatggttctacagccattataataaatagatatttgaatttcagctaactcatagaaaattaagcacatcctgacattgatgacatcagattgggactgaatcacttagtcccattcattcgctgcccattagaacctttcttttttctcctccttaatgaccattctctcaattttcctatcttgccacacctttttttgttcttttctccttttccacctttttctttaggcaatacttaatatgaaaggggctcttgaccctttctttattatatcaaggatgtcaaagagcatgccatctgtcacaatccttctagttcattggtaaagtgtggtgttcagaaggattttgaaactgtctgggctatgatgagctagcagtaccggcccacacagacagatggcagcactggaggcgtattttcccggctgctgccactgcagccttaaactcttccatgaaacacatttgggtttgtttgctcgtttgtttgtttgtttgtttctttattttgagacactctgccaaccagtctggagtgcagtggcgttatcatcactgactgaagcctcaacctcctgggctcaggtgatcctcccacctccgcctcccaatagctgggactataggcacacaccatcacacccagctaatttttatactttttgtagagacagggcttcgctgtgtttcccaggctggtctcgaactcctgggctcaagcaatcctccctccttggcctaccaaagtgctgggattacaggcatgagccaccacgcctggcccacacttgagtttaaaagaaaaataagacttagttttggtatttaatttattaaatattcacagaacagtaaaatgattcacaggaaaaaaatgtcaaaataataaggtttttctctttaatattatcaaatctgtttttaaatccttacaaaagacgatgtaacccatttattttattttattttattttggagaaagagtctcactctgtttcccaggccggagcacagtggcgcaattttggctcactgcaacctccgcctcccacattcaagcaattcttgtgcctcaacctcccgagtagctgggactacaggcacacaccaccatgcctggctactttttggtattttagtagagaaagggtttcactgtgttgcccaggtgggtctcgaattcctgagctcaggcaatccacctgacttggcctcccaaagtgctaggattacagacacgagccaccattcccagccaatgtaacccatttatttttacagaaatgatttattgaaacaaattacacagcttcaaaaaccagtgaagcagatcaaagacatatccaaaacattaataattcagcatgttgtaagacagatgaacaaatgtgcaacagagaataacagaagtcttttctagttaaccttaacaccaaattcatgagtcatacagatgaatctactgaaatgcccaatgcgaaaaaccatcagagcagctttagacctaatacattgataaaacttattagagtttcgctgggcgcagtggctcactcctgtaatcccagcactttgggaggccaaggcgggcgtattatctgaggttgggagttcgagaccagcctgaccaacgtagagaaaccctgtctctactaaaaatacaaaattagttgggtgtgacggcgcaagcctgtaatcccagctactcaggaggctgaggcaggagaatcacttgaacccgggaggcagagattgctgtgagccgagatcgtgccattgcactccagcctgggcaacaagagcgaaactctgtctcaaaaaaaaaaaaaaattattagagtttcacaacactgattaaaaccatatagcataacttgtagacatttaaagtctttaggaaccctacatttttttaaaaaaaatctgcttttcctgaagcaaataaagaagtactttttaaatttatgtatttgtgtgtgtgagtttgcgtgtgtatgtgtgtgtcaaatgagtgcacaggccagctggaaagttccatctctgattcattaaccataaatgtttccgtgtatggttgctaacttttatctctgtgttttctcaagattgaacaaaggcttgtccaggcccagaacttaactcagggctgggaagagatcaagcacctgaagtctgagctctggatttacctgcaagatgctgatcagcaactgcagaacatgaagaggaggcactctgagctggagctgaacattgcacagaacatggtttcacaagttaaggtgggaattaatttgcccccaagggagataaaagaggccaacagagtagaaaacctgaaatgtgttcagtgtattcacttcaatatgcctgagtgtctgtcaatccttagacattaatacaactctttaaggcagaggtccccaagccccaggttatggacaagcacaagtccatgtcctgttaggaacctggccgcacagtgggaggcgagcaagcattaatgcctgaactccacctcctgtcagatcagaggccacatcagattctcataggagtgcaaaccctactgtgaactgcgcatgcaagggatctaggttgcatgctccttatgataatctaactaatatctgatgatttgaggtggaacagcttcatcctgaaaccatccccctccagccccattcacggaaaaattgttttccacaaaacccatcccaggtgccaaaaagtttggggaccgctgctttaaggaatagcaaatctgaacaaacatcatttggtgccagggaaaacagattataaagtagacattcaaatatattactgaagcttcagatggccactttcatcagaagacattcatactctacattattcctgagaaaagcaggtgtgatttagtctacagagtagactgcttagtcagaaaactctgtgactaagcaaacatggaacattattctttttttagattttcatcaccatattatgctaaaactgtaggactgtaagcttatcaattcattagttatatatttgagctatatgtaattaatttaaagtataatataaatgcagtttgtattacatatttatatataatttaaataatttaaaatatataggaaattgtggccgggtgtggtggctcatgcctgtaatcccagcactttgggaagctgaggtgggcagatcacttgaggccaggagtttgagaccaggctggccaacatggtgagaccacatctttattaaaaatacaaaaattagccttgcgtggcacatgcctataatctcagctacttgggaggctgaggcacgagaatcatttgaacttggaaggcggaggttgcagtgagccatgatcatgccactgcactccagcctgggccacagagtgagactctgtctcaaaaaaaagggaaaaaagaaaattataagtgtattaacttaattggaagttgggtcagattttaaataaacttaaagatgttttttctctgtgattatgagtcaataataatatattgtctactggagtgctgtttgcaagtacagaaaaaaaagagaatagggatcgggataataagatttattttttctcagaagcatgaactcttttttaaaaaaatttgtgaaccatcctagaaatttaattttttaaaatgtattttataagaaaagttttgtttattataaaaggcttagaaaatacagaaatgtcttaataagcaaatttaaatcacaatcacttatgatactaccattcagagataataaacaatgccaatattttgctgtatttgttttagatatacacataataaaaacattcaagatgatactcttgttaacattttaattgtgattgaacctagctttaaggacaaaatttcatatatcagtcaggggatttaagaggtgttttttgggtagtgggagtaaatggaaatgggagtgagcagtggggaagtatggaagtccatgaaccaaccccttggaggaaacactatccaaagaaatgatcctctggccacatgttgggctggcagagatggtatcttagaggtttctttttgctgtgtatgcagggagtagatgaatctaaaccattgcctttccactttgcgaatgtactccagccttccccaactctgtacataacaccactgcccacctggtgacccaagctactttgccttgtctctgacatttggaaggtttccgtcagaggcgttcaaaccagagcgactccatcttgaataggggctgggtaaaatgaggctgagacctgctgggctgcattcccagaaagttaggcattcttagtcacaggatatttagttaagggaacaggttaataatgtttactgaacagatccagaacttgacagatccaggacttagcagacctaggaaatgtcctaatgtcctgatgtcttgagaataaaagcacccttagtttaagaataaattttgaaaaacatgaactccttaaaaattcttagaaaacaaaggccgcacttcaaggtaagataatgacttttttcattaatgactgtaatgtttcacatgtattagtttttctttatgcctcttggaatagtacaataaaagaatataccacagctaccctgaatcttgcacacgtgggaattaacgttcataaagaggtatggtgatttttagattttctctttgtttcccataacttattatacattcttcagtttttttcatattaaggaacttagagtgtttaaaggtcttatgtctgtgttgctctctatatttatttgggcatttcttaacacattacatattttttgttgctgttatcctttaggattttgttaagaaactacagagcaaacaggcatccgtgaacaccataatagaaaaggtgaataagttaacaaagaaggaggaatcgcctgaacacaaggaaataaatcatttaaatgatcagtggctcgatttgtgccgtcagtctaacaacctgtgcttgcaaagggaagaggatcttcagagaacaagagattaccatgactgtatgaatgttgttgaagtgttcctagaaaaatttactacagaatgggataacttggccaggtaacagaaattctcccatgggtcaccaaaatgctaagccagacatttcttaatatctataaaaatttaaaatgtgcccaggtgcagtggctgatgcctgtaatcccagcactttaggaggctgaggcgggtggattagttgaggtcaggagttcgagaccagcctggacaacatggtgaaacctcatctctactaaaaatacaaaaattagccgggcgtggtggtgcatgcttgtaatcccagctacttcggaggctgaggcaggagaatcaattgaacctgggaggaggaggctgcagtgagccaagattgcaccactgtactccagcctgggtgacagagcaagaccctgtctcaaaaaaataaaataaaatgtcttaggtataacatctattgtttattattattaatattggtaagtagaacatcattatgaacctaacgttttcaaatggatatagagtcatggttttcctagctcgatattgatttaaccagtgggtaaaagagaaatgtttgaaaatggtaccattttctctgtgacctcaaagaatattctaaaaatatttctaattttgtttaattacaagttatgggatatcatctatgaattcatgaaatgaatccttcttgaacctatatgctccctagtttcttatcaagtctataaggtaatgaatgcattctgtgtaattcagtcaggtttttttcttacaagagtctagaaattcagttaatttgtgtcttttgtgattttgtagttattgaacccctcttagctttcttctttgaaaaataagaacacacacacacatactggatcattatatgaaaccattccatacttttgatcactataattgttaaaatctacacttcttctgcaccgatttactagtttacagcaaagaaaactgcaaatattgttctagatatcatgaaatcatagtggggatttggggtttttttggtataccattttctggtttgtttgcttttctttgatacttaacattttactcgtctttgggattagtccagtaaatattaacaactcatatttctggctcacagtaggccccacagacacctgagacttaacaggtccaaaacagaactcctcatactgcctcccaaccctgcttttcatacttcagaactgatcatttagtaaaaaagactacaatattccattttttatgtgtgcttcatagtcaaagggatgagaattctttacatttcacacttattactaaagattactaatgataagcaaaaaatatccaagtacacaattaagtagccattagatctgttggttataccttacagattgtactacctagaactatattgtttgttggaccctcttcacaaaagaaagcacataaatcatgcatcacttattaatttctttcagtatcattttctagagtacactagatcagtgcttctcactgtttaacattacacaaaacatccaaggatcctgttaccatatagattctgctcagttgataagagccagaggaagataaaagcatattctgatttgattggaaggcattatcagccagaaagaagtaggcaacttggtttgattcaacttctagtattgacttctgatgagacttgtattccataattatagcacttctgtcaacaaaccatgaattgaactactctcaattgttctaagctcagaagatccacttaaagaaatggtgaagtgtcagccaggagtagtggctcatgcctgtaatcctagcactttgggaggctgaggcaggtggatcacctgaggtcaggagttagagaccagcctgaccaacatggtgaaaccctgtctctactaaaaatagaaaattagccgagcatggtggcacatgcctgtaatctcagctacttgggaggctgaggcaggagaatcgcttgaacctgggaggcggaggttgccgtgagctgagatcagagcattcattgcactccagcctgggaaacaagagcaaaactcagtctccaaaaagaaaatggtgaagtgtaatttagcatagtatgaacaaacatcgatattgactacagctaatttgctcttatacctttccatgtattttcagatctgatgcagagagtacagctgtccacctggaagctttgaaaaagttagcattggcattgcaggagagaaagtatgctattgaagatctgaaagatcaaaagcagaaaatgatagagcatctgaatttagatgacaaggagttagtcaaagaacagacgagtcatttagagcaacgttggtttcagcttgaggacctcattaaaaggaaaatccaagtgtcagtcaccaacttggaggagttaaatgtggtgcagtccagatttcaggagctaatggagtgggcagaagagcaacaacccaacatcgccgaggcccttaagcagagccctcctccagatatggctcagaaccttctcatggatcacctggccatctgcagtgaactggaggccaagcagatgctcctgaaatcgcttataaaggacgcagacagggtcatggcagatcttggtctcaatgagcgacaggtcatccagaaggctctctctgatgcacaaagccacgtgaattgtctcagtgacttagtgggccagcgaagaaagtacttaaacaaagccttgtccgagaaaacccagtttctcatggcagtgttccaggccaccagccaaattcagcaacatgagcgaaagataatgttccgtgaacacatctgtctgttaccagatgatgtgagcaaacaagtcaaaacatgtaagagtgcacaagccagcctcaagacttaccaaaatgaagtcactggactttgggcccagggtcgcgaactaatgaaggaagtcacagagcaggaaaagagtgaagtgctggggaagcttcaggaattgcagagtgtctatgacagtgttttacaaaagtgcagtcaccggttacaagaactagagaagaatttggtttctaggaagcattttaaggaagattttgataaagcttgccactggctaaaacaagcagatattgttacatttcctgaaatcaacctaatgaatgagagtactgagcttcatacacaactggctaaataccaaaacattcttgaacaatctccagaatatgaaaatcttctacttacgctgcagagaactgggcagaccatattaccatcgctgaatgaagtcgatcattcctacctcagtgaaaagctaaatgctttgcctcgacaatttaatgtaattgttgccttggctaaagacaagttctataaagtccaggaagcaattcttgctcggaaggaatatgcttccttgattgagttgacaacccagtctctgagtgaacttgaagcccaattcttgaggatgagcaaagttcccaccgacctggccgttgaggaggctctttctctgcaagatggttgcagagccattctggacgaggtggcgggccttggggaggcggtggatgaactgaaccagaaaaaagaaggttttcgcagcacaggtcagccttggcagccagacaagatgctgcaccttgtcaccttatatcacaggctgaagcgacaaacagaacagagggttagcttattagaagacaccaccagtgcttaccaagaacacgagaagatgtgccaacagctggagagacaactgaagtctgtaaaagaggagcagtccaaagtgaatgaggaaacgctgcctgcagaggagaagctcaaaatgtatcactccctggcaggaagtctccaggactcagggattgtactgaaacgagtaaccatacatcttgaagatcttgccccacaccttgaccccttggcttatgagaaagccaggcatcagatccagtcctggcaaggggagttaaaactgttgacttctgccattggtgagacggtgacagaatgtgagagccgaatggtgcagagtatagacttccagactgagatgagtcgctccctggactggctgaggagagtgaaggcagagctcagtgggccggtgtacctagacctcaacctgcaggacatccaagaggaaatcagaaaaatccaaattcatcaggaagaggtccagtccagcttgagaatcatgaatgcgctgagtcacaaggaaaaggagaagttcacaaaggccaaggagctgatttctgcggatttagaacacagcctcgctgagctctcagagctggatggagacatccaggaagccttacgcaccagacaggtgggtataataggacttcacttctcttttttccactctgcttatttgtaaacaggtacaagaaattcgtttgcttggttataattgcttctttaaatatttctttcgaaatactacacagaagcatcttcagcagtgacttaaatggttattttaattgtttttcgttttgttttgttttgttttgttttttgggtttttttgagacgaagtctcgctctgttgcccaggctggagtgcagtggtgcaatctcggcttactgcaacctccgcctcctgggttcaagtgattcttgtgcctcagcctcccgagtagctgggattacaggcacccgccatcacatccagctaatttttgtattttttagtagagacagggtttcattatgttggccaagccggtctcaaactcctgacgtcaaacgatctgcctgccttggcctcccaaagtgctggaattataggcgggagccaccgtgcctggccaggtgattttaattgtttatgtgcatgatattcattttgtgtggtttccatcttgacttcactttgcttataacagtgatgcctcagtgatttctcaccttaaaagagatgataaatggtattagtaacataattaatattatatattagtacatggatagtacaactgattaaccatgaataattagtgatgccctttgtaaacaatgtgaaggctggtatttctaaaatcacctgctagatgaagagtctaaatggagagaggcagacaatgcagccctgaccttgccaataagccacatttttgtggggtatcccattagttgccccatctcttcaccccctctgtggggatgagtgctgtccttctcctgcttccctgtagcacagcagaagaaagactagaatactcgtaattacttgacttggggataacaaaaagaaatgggagcatgtacaaaacttcccagattggcctaattgcagcttgctctggggcttgcaagttctgtgcattcaaaaataagaagagggctgggcgcggtggctcacgcctttaatcccagcactttgggagggtgaggtgggtggatcacctgaggtcaggagtttgacaccagcctgaccaacatggtgaaaccctgtctctactaaatacaaaaaaaaaaaaattagctgggtttggtggtgcatacctgtaatcctaactatttgggaggctgaggcagtaaaatcgcttaaacccaggaggcagaggttgcagtgagccgagatcatgacattgcactccagcctaggcaacaagagtgaaactctgtctaaataaataaataaataaataaataaataaataaataaataaaataaaataagaagagaaaaatagtgcctagaggattacttcctttaacttcttggcccattttctccatgtctgtctttagtccctgtgattctaggagatgtcaaccaaccctttaggtaaaggatagctttcgtcaggataatacagcagctatagcctgggaggagggcacatctgagttttaatggcagctatttgatctcaggaaaatgacatcctataaggctctgtccctctttgtagaagagagatattaatgattcttttattaggtttatcttcttagcattgggtctgacacgaagtaacctcagatgaatcttagctctcatttaactatattttctgcagaggttaaggttaacactttaaatagtaaaaattttaatattggataaaatcataataaacttcttaaaattctgactttttaaactaaaaactagtacactttaaccttttcatgttgattcaaggctattgcttatacaaattttaaactatttttctagcgctattagtataaatagagatatagaatctagaatgtagagtaagaacagaagttagcagaaattttcattcttgaaaaacatttgtcaggtaagcttgcttcttttggtgagttttgaaccaaactcttaaatctactaagatgtctctgcttgtgccatcttgtcttattgattatcttggtccaaataactaaaggtcatggttcctggggcatttcttattccctccgctgattctatgctttgctgtccctgttctttccctaattggtgctcatcttatgggtactttctctaccttttctatgcatcttcgcttgcacagttgcggcttatcttgtctagtcattgatggctggttagagtgtttcttttccttctggaattgaatggaccagccatccagacttaaacttttcaacttttctattttagtctgtatacaagactcacaggttactatttcgcttccagaaattactctgtggctctgtggtctggtaaatgccagtttggaagtttgatgttgctatatttcttttttttttcttttcttttcctttccatgtttgtttgtttgtttgttttttgagagacagagtctggggtgcagtgaaacgatctcagctcactgcaacctctgcctctcaggttcaagcaattcttgtgcctcaacctcccaagtagctgttacaggcatgtgccaccacactcagctaattttcgtatttttagtagagacacggtttcaccatgttagccaggctggtctcaaactcctggcctcaagtgatctgcctccctcagcctcccaaagtgctgagattacagtcatgagccagcacgcctggccgtgttgttatacttctaaccaacggagacattactgcactttgataaacatccagtctgccacatattactaagcatcatattatttcttagagagggaagtttcagaactagtcaagatactgacataaatttctatcccatttctgtccttattatttaatttaatggcagtaataaaattataacaagaatagcagaaggaaaaatcaaggataatgatgatggcaccacaaaaatattccactaacttatcaatgcacttacacacatacgcccatgagactaaggactggaaaacaaatgagtgaataaaactctttcctgcaaacacattgcaaaggagagttgattatgtttgcaattgctgtttttcaggctaccttgactgaaatatatagccagtgtcaaaggtattatcaggtatttcaagcagccaatgactggcttgaggatgcccaagaattgttacagctggcaggcaatggcctagacgtggagagcgcagaggaaaatctcaaaagccacatggaatttttcagtacagaggatcagttccatagtaacctggaggagctccacagcctggtagccaccctggacccactcatcaagccaaccggcaaagaagacctagaacagaaagtggcttctctggaactcaggagccagaggatgagccgggactctggtgcccaagtggatctcttgcagaggtatttcaggatgttttgtgttttatgttttagtgaaatgaatttccacactgaaagtagtaatacacgaatgatatacattagcacgtaaattcatttttccctgagtatcattagacatactgacaccagagcttcgtgtagaaatacgtgatttcgtgctacttatcagtttctgttggactctttcaagatgcacagctcaatggcacgattaccagaaagcaagggaagaggttattgaattgatgaatgatacagaaaagaaattgtctgagttttctttgttgaagacttcgtctagtcatgaagcggaagaaaaattgtcagaacacaaggtcagagttttgggccatttaaaaaaaatcctttttctataattataatgagtctttgcaacatgatcaataaatcttcatttctacctggactttttcaatgtgataaggatgcatttaacaacattttatagaagttttaagtttattaaatgctattaccttttaggattcccattggaaatgcatagctaagatgttcagagcaatttgcttccgataagatgtggcacttaataaatgtcagtgaatactttttgttgataacagattaaataaaactaaaacgttaataactgagtctccctttatcagagcaatataaggaaaaaatgtaacatactaaaatattgcatttggttcacttgcatttgtgctgctttttaaaaatgaaaaaaatgtcatctcaagtagcaaaatacacttttgtttttaataaataaataatattcaccttacctctttaaaaagctttaagactcactctggttaaaaaataaacataaaagtaagagtacctagaggagaataaacgtatgtagaaacatttccttttgcaggaattttgggctttaccaagatccatagaactttataaaattaaattgatctctcccttgtctcctctcttccgtcctccacccccaaccctaggctttagtgtcagtggttaactctttccatgagaaaattgtggcccttgaggaaaaagcttcacaactggagaaaaccggaaatgatgccagcaaagccaccctgagcaggtcaatgaccaccgtctggcagcgctggacacgccttcgagctgtggcccaggaccaggagaagatcctggaagatgcagtggatgagtggacgggctttaacaacaaggtagtttccactgtccatgggctcacctttctttcctcactaattataatgtattttgaaacacagtattttgcccctttttgaagtcagccttatgaaagtaataaaggctttttaaaatctgtttcagtgacataaaaattaagttatgaaacaaagtacaaaatgcaatgtgcagtttagtcccaagtcacagtcaaattatttcaatgagaaaaaccaagcaattaaattgtgaaaggagaacaagcccattttgccccatttgctttctttcttttttttgacggagtctccctctgtcgcccaggctggagtgcagtggcgccatctcggctcactgcaagctccgcctcccgggttcacgccattctcctgcctcagcctcccgagtagcgagtagctgggactacaggcgcccgccaccacgcctggccaattttttgtatttttattagagacgaggtttcacctcgttagccaggatgttctcaatctcctgacctcgtgatccgcccgcctcagcccccgccaagtgctgggattacaggcgtgagccaccgcgcccggcccatttgctttcttaacggccttgaaaaagaatgagatactttttctttaccatgaaacctgaaaatgagcagaaatttgactcattacccaaattgtatattcaactttttcctttttggagtcttgctctgtcgcccaggctagagtgcagtggtgtgatctcagctcactgcaacctccaccccctgggttcaagcaattctcctgcctcaccctcatgagtagctgggattacaggcacccgccaccacacctggttaatttttgtatttttagtagagacggggtttctccatgtttgtcaggcttgtctcaagctcctgacctcaggtgatctgcctgtctcggcctccgaaagtgctgggattacaggcacgagccaccacatgcctggcagctttttccatctttaaaggtttaatgttttaagccattattttcctttatgatttaaaggcactcatttatgttaacttaaatattggaaagagtattttgtttgcttagtttttttttaaagctttttctgtattaagtatagtctctgattgtcctaatattattttgagattaaagctttaaacccagaggtatagaggtgatatctcctttcatgttaagaaggttgctcaggttccagtttcctaacatgtggaatttatatcatcatctttaattggcttcatacactagtgtgtggcttttatgggagttaccctatttttttcagtttatttattattgaacttcatagtatgtacatttgtcatcaggttaaaaaggccactgaaatgattgatcagctgcaagataagttacctggaagttcagcagagaaagcatcgaaagcagagctcttaactcttcttgaataccacgacacgttcgttctggagctggagcagcagcagtcggccttgggcatgctgcggcagcaaaccctgagcatgctccaggatggagccgccccaacccctggggaagagcctccgctcatgcaggaaatcaccgccatgcaagatcggtgcctgaagtaattaagcacctactttcattcttttgtttgtttgtttgtttggagtctcgctctgtcgcccaggctggagtgcaaatgtgtgatctcggctcactgcaagctccgcctcccgggttcacgccattctcctgcctcagcctctctgagtagctgggactacaggcgcccgccaccacgcccggctaattttttgtatttttagtagagacggggtttcaccgtggtcttgatctcctgacctcgtgatccgcccgcctcggcctcccagagtgctgggattacaagcgtgagccaccgcgcccggcccctactttcattctgttactgaacttggccttgggataagtaggttatgaagtatgaaggtgctccttcacaccaccttgaaaatgtggggatccgttcccatcactcttgcttttccgtttccttaactcttcaatcgtttgtctgacaaatacatatctgatagtacttagagatacgatggtgaaccatacagactcagtgtctaccttcatgccgtttacagtcaagccgcagagagctaggcaactaaggcagcctttgtagtcaagtgtgaaaagggagctgagggaatccgaagcagagacaagcagccgaggagaggggtcaaagaaggcatcccttcagaaggggaattgaagcagaagcctgagcgggctggagctaggcattgagttttgcaaacagggaaatgacatgtaagaaaggaataaacgtgtcactttcaaggagctccttgggtgatgcggggaggggaagggtgattcaagagaaatgaagcatgagatggaaaccattgagagctattaagaacttagatttgatgaagcttgagaactcattggccatctggggtgacagggatataggagcgcagtccaggtaaataatagccatcgactagcagtgaatttagtagaaagagcaagttaatcctgatgtataaccagccctgactcacttcttgggccagagaaaaaaatattcattgataatttaatttctacatttacaaatattacctcattcatgtccttgcatttcacctctttcccttataggtgatgtcaaggtaacctaacactttttaaaatcttcttaccaaatttacattaattcaaataaagacttgaaatttgtacattattaacgtgattaattatgacatttccaaagcttgatttttttctttaaagactactttctattagatagctatatatattccaattacacattacttttaaatgtaccattttaggagatttccaaagaggaagtaaataatgaaataatctccaggctactttaaataggaaattgattgcaatttagtggcatgtgagacagtcaactctcagtttttcaaggataaattatttactttatatgacatttatacatgaactgcagtgttatttaacagtgttgaggaagtgtcttttctttcaaaaaagatactaggtttcccatttctatatatgtattggataaaatgttgccaagtattagggggttcctttcacttcacttctgttttatccctgtaatgtttctgaagcatgcaggagaaagtgaagactaatggaaagttggtgaagcaagagctgaaggaccgagaaatggtggagactcagatcaattctgtgaaatgttgggttcaggaaacgaaagaatatttagggaatccaacaatagaaatagatgctcaacttgaagaacttcaggtacaaaaaagtctcctcattctctttacccatcatttcaaaaacaattgccctgattttagttgaacatacttgtttgtatttattgaatattgaattaaaaaatttcagaagtgtgttatataaaagatatttagtattacttcatgggattttcctttgttttttaaagtgaacatactttatattcagagacaaaagaacaatgttgtattaagatatttttctaattccacacttaattatatgttgatgaaaaatatacagccttgtctataacagtccccttagaaggttcccagaaatttcttattttgatcttttcttcagattctcctaacagaagccacaaatcaccgacagaacattgaaaaaatggcagaagaacagaaggagaagtacttaggtctttataccatattaccttctgaactctcccttcagttggctgaagtggcgttagatctaaagatccgagatcaggtaaacctatgatcaagaaagagtgtctttccattttgtttatagggtcagtcctcttgtgtgagagttcttgattttcacaataatgtcttcttggagacagagttaaaaaaaatagatggctataaaacaataatattaaattagaagtctttttcataggcaagatgatcatagatatgaccaataatgccatacaattaaagataatttttgtgcttcccctcacctttaaaaaaagacttaaagaaacaaaaagtaagatatgtttcatgtgttcaacaaatatttagtgaatgcccagagtgtgccagggactcttccagctgttattttatttcagcagtgcaacaaaatgtcagttaagtaggtgaagatgttggaggaaagggaaaaatcaaagaaataaaaataagatcaaggcagggatgaagttatttcctaaaatgcatgcgggtgggtcccctaatgttgctagagaagagccatcattttaaccctagcttctaaacacccaaggaaaagagtaaatagaaacataatcctgtctataactctaaaaaacaaatatttttgtttctttgagaagaaatgcatagtcctttttggtgttgagaccagagtgagatttctgtctctggtctcatgaagagcacaatttcatgtagtgaaaataggctcaaatatcatctgtatggaaatataatagatttttcggactctcttggtggcttaatgctaaagctattaaagtttaatgaaaacccttctatatgagacaaagagaagacatactacaattctaaattgctacatgaaatagaaagtaatatcccattgtacaaactgtaaaactcatacagttgtgctctacttttggaatcttcaatgtatgatgcaaagtgttttaaaaatctcatcaaaatctgatcctactgcatcatgactttgacctaaactactgataaatgctctttactattttaagtatttaattgatatatttggcttttcttcttagacattggaagatctactgggaaggatgacttggcaagttcatggtctttttatatttttgagacagagtctcgctctgtcccccaggctggagtgcagtgaaacaatctcagcttactgcaacctcctgggtttaagcagttctcgtgcctcagcctcccaagtagctgggattccaggcatgcaccaccatacccggctaattttttgtatttttagtaaaaagagacaaggttttgccatgttggccagcctggtctcaaactcctggcctcaagtgagctgcctgcctcagcctcccaaagtgctgggattacaggtgtgcacctctgtgcacagccatggtttttctttgtttgtttgtttgtttttttagttaaaatttaagcttttctctggattaattttcctatcatagccttattcatatgtatttcatttactttgacactcaaaataatgaaggccaaaacacaccattaactctcttttaatggtgtgttttctccctactaaagaggtttttttaaagacctttaactacataaagaaatgtttcttctctttaatgtcttttcttcggcattttattctaagcaacagtgtgaatgtttgttatcaaatcaaaccaaagtcactggaaatttgtaaatgcgaactgtcttttttcaccttcctttccattggatgtacttaatgcttggttggcatactatagagctgtagtcggaaagttacaaaaagagttaacagatcattaagagtcatttattaaaaggtgcttggaaacaaatcagtgtgcttccaactgtttgggaggattttccatcttatgaagaaaaaggcttagaggagtttgtgtgctcaaggtcattacgttagttaatggagaagataggattcaaactcagctgtctacacaaccatctataatgagtattctgtaaatatttaataagtgaatttctctacacacattgcttgtatctttgctggaacacaaggagtgcagtaaatacttaaagatagtgaagtcagggaaagccaggagggcttgtaactaatcgcacatcgctggtgtgaccaggtgtttcaatgccaaagcagttaaaatgtgtcttgtcaacatcatttgagatttttagtatctattattcacttttaaccatggcttgttttgctgttcttactgatttttttagatccaagacaaaataaaagaagttgagcagagcaaggccacgagccaggaactcagccggcaaattcagaagttagctaaagacctcacaactattctaactaagctgaaagcgaagacagataatgtagttcaagctaaaactgaccaaaaggtaagaagtagaattttaaagggtactactgaatgaattaaatagtttttggagtcagttttacttggggatataggataaaaaccttttaggaaccttttttaaaaccaaatagtaacagcaggtggtaaagaaattttgtaactgaagcaacacagatcctcttacataattgatcattataattgaacagtattaataaatatacatgcatgagtgtgtacgaaagaagagcgtcaaaggactaagtgatgatttaggaatacaagtatataaattccaaactgaattgtgtccttggtagctaaatctgtgttcttcctctgttgatgagttcagggactctaatcctttttgggtggggcagaaggaaaatgttagccttctcactcagcctcataggaaataaacaccagcattacaacatatcctgccctgcctttccaaccgaagaaacaaaaatgacctgatcatagtagaattatagtagaattattcattataatatttggctttgacaaaaatcagtctgatctcgggaaacctggagaaatttattttctgtactctaatgttctttcattttggtgaccatcaaggtgctgggagaggaattagatggctgtaattcaaagttaatggaattagatgcagcagtacagaaattcttggaacagaatggccaactgggtaagccactggccaagaagataggaaaactgactgaacttcaccagcagaccattagacaagctgagaatcggctctccaagctcaatcaggtatgtgttccgggccagaaatccaaatcgtgtaaggcagaaacttccatgttctgcttttctcttttgaaaataaattaacataaataaaaagataaaatggacaatgagagagtagtttaggtgtagcttatttcatgctacacttgtgatcctaagacttaggtataaaccagcacttactttatatccagccatatgataaagtcactgacaaaggtggtcctacaaatggactttggagtgaatattttgtaaaatggagaagtattttgtagaatgaatattcacccattaacgtgttttatgaaatcagtttggggtgaattcaagtacctttaagtaagctacatatatatcagcttacgttgacttaatagattcagattgcacgtctgtaataattgttgcatatagactagacttttgaaatcgattaatataatcagggacaagttaaaaccaggagttggtaacccattaattatagtttgaaactttgcctgctagaatccccacttgccacctccttacccaggggagggtgaaggaagggatagaggaaggcctggcatggtggctcatacctataatcctagtactttgggaggctgaggcagaaggatcacttgagcctaggagtttgagaccagcctgggcaacatggtgaaacctacaaaagattcaaaaatttaacagggcatggttggcacgtgcctgtggtcccagctacgtgggaggctgaggtgggaggctgagcccgtaagattgaggctgtaattaaccatgatccagctgctgcattccagccggggtgacagtaagaccttggaaaaaaaaaaaaaagaaaaaagaaaaaagaaagaaaaagaggaataattcaatcatattaagaacttgagctttatcctaaggtcactgagaaagctttgacagattttaacagggaaacgatcttttgataccattgaatatcataggtattataatgatcaacccctaagactgttgtgtccaaagagagagaagactgatttatagctcaagaaactgaggagtttacatttgttacattaatgttactggtttttcaggcagcatcacatttagaagaatacaatgaaatgcttgaattaattttgaagtggattgaaaaagctaaagtcttggctcatggaactattgcatggaattctgcaagccagcttcgggaacaatatattttgcatcaggtaaccttaggaaaaataatctttaaaaagtaaccaagggcaatttgatttaactgggtagactgacacaacacttagagggctgtgatgtaaaatttttggagctaccagataaaaagaatgctaaggtacccctaagttgttcagtagttggacagaaaggagcttctcatgaaatttcatgaaattgaataaataaatatccttgatcttccctaaacctaccttacaccaagacccaaaccaatcagccttgtagaactcattttctgtagcttctttgaaataattatctgcagggatctggtgggaaattctttcctgtgaagagatgcaatgaagtgtggaaagattctagactccacactcagactggtgggaaaaccaagctccgccatgcagggctgtgtgatttggagcagaatgctttgcctctctgaattctgtcttctcatcatttgtatgaagacgtaaataatattcgtatttcagacttatgagatcaagtggtttaaggtacacacgtgcaaacgtctgcctggcacatgcaggtgctcagtgggagatctcccgcctcctccctcagccctcacccaggcctgtcatctggccttccacaggaggtcgggcagcccagagcaagccatgagtccacatcacatgctggctatgttagttcatttcctctgaagttacatgagaaaaatgttccttttctgtcagtcacgtcatccaggaaattatttcatccttttgtaacttaagcttaaattagacacagatagttaataggctagttatcatataataaaatatagggtgacttttataggagttacatgggtatcgagtattctagatttttgtctcttatattatttatgtatccttgtggcctttaaatgaatccctgtttccattcttgtttacagggttctagatcaaagcctcatttttccatttttggaatgctttaacagcttctaatttttccctatattcacagtctttcttctctgatcaatcttgcgtattcttcccacaatgtctttcttaagcaactccaatcttttgctttaagatatgcttagatatgaacagacaggacttaagttaccactgatttgaaaacaatgaaaaaaagccaacatccttagaagtctagaaatgcaaatttcagcaaaaaaagagaggaagaaagacaaacttaactgtcacattcatactgtttctttcaagttcatatttaaggaagtgagagctctcaaacattgctggtatcctggtaaaatctctttgaaaaataattggcaaaatgtatggtgattgtcaaaaatgttgctactctgggccacgtgcggtggctcacacctgtaatcccagcactttgggaggccgaggtgggtggatcacaaggtcaggagttcaagaccagcttggccaatatggtgaaaccccatctctactaaaaatacaaaagttagctgggcatggtggtgggcacctgtagtcccagctactcaggaatctgaggcaggagaatcgcttgaactcgggaggtggaggttgcagtgagccaagatcatgccactgcactccagcctgggtgacagtgagactccatctcaaaaaaaaaaaaaaaaaaaaaaaagttactactctggcctgttggctccttttggactcctttttatggctacaatccaaaatatagaaaatattttccacagtattaataactgtagtgaaagtttaaagaaaacttaaatgtgaaataatttttttccaagtaaatatttgcatataataaaatataatgaagtccttaaggttatcatgactttttttttcttttttgagacagcatttcgctctatcgcccaggctgtagctcagtggcgtgatctcagctcactgcaacctcgtcatcattgcagtgagccgagatcacgccactgagctacagcctgggcaggttcaagtgaatcttgtccctcagcctcctgaatagctggaactacaggcacgtgccatcacacctggctaattgttgcatttttagtagagatggggtttcgccatgctggccagactggtctcaaactcctggcctcaagcgatctactcgccttggcatccccaaattctgggaatacaagcgtttgtttatttattcaacaaacatacagtcctttcccaaactaggactttggttaggcatttagggtacaaaggatattccctgtccccaccccagggagttgattatttaggggaggggacagatagaaggaaacagtacaatatagtgtgatttgtgcaaagacagagggcccaggtgctgaaggagcccacaggagtgtgctcaacccaaccgcccaccaggggtttaagaggaaagtgcagaaaggcttctcaggaaaaggtgatgatgggctgagtcctgaaaaacatgacagcctacttgtggaatgtgtttagataaaaatgtatgctgaaatcctagcagtaaatgtgaggagtgttttctggtgctggtacaagggataagagataagaatagagagataagaaaaagatcctaaaagtctgttgggaatttggactttatcctgaagtcactctgaagcctctgaaactgatattctgcctgcaaaggacaagttcagacttgtattttcagaaagcaaatttagcagcctttggaaaacacattgaggacagtaagacaatataaaagatggtttcagtatttcagtagaagatgacaaggcctctctttggagattaggaggagaagacaaagtcaagagatactaagcagctggaattctccaatttggagactgaattgggtgaaagagagggaggagtcaacgatgaaagacagggaggagtcaaggatgattcccaggtttctatgactcgagcagtagggtgggttgactgcatcatggggcacagtgaaaaagacaccaggtcctgagatgatctggctcagaagctgaagagagaacgcagactgtagactcttttggtgagttctcacgtgccccctttaggaagtaaagcagcctgtgtttatttaaaaagagtgcactgtgagaaaagccattgtgttctttgagaggccaagaggggtggatcacttgaggtcaagagttcgagaccagcctggccaacatagtgaaaccccattctctactaaaaatacaaaagttagctggacgtggttgggagtgcctgtaattccagctgctcggatggctgaggcaggagaatcgcttgaacctgggaggcagccgttgcagtgagcttagatcgcgccattgcactccagcctggccacagagcaagactccatttcaaaaaaaaaaaaaaaaagaaaagaaaatccattgtgttttttctaatgtcagagatgtgagaaccagagtgacttcgtaggggcctgaataggggctgggtaaatgaggatgacacctattgggtagcattcccacgtcaggcattcttagtcacagaataattatggttagacaggttgataatgctaactgaagatacccaggccttaatagatctgggaaataacagactcaggcaatgtcctgatatcctggtatcttaagaacaaaagcattcttggatctatatttaaaaaataattttaacatagattcttatagaagacagcagttacacaaagatcaacaatcttttgtcacaggcccttgcagagcatatctccgccgtgattttttgctttgttgtcttatatataagcagacattgtacctaaggtggatgcatttcttttcctgcttttggggacaccctgctttgtcaatggagtagccgttctttcatccctttactttcttaataaacttgctttcattttactctggatttgccccacattatttcttgcacaagattcaagaacccgcttttgaggtctggattgggacctttttccggtaacgctaaggtcgggtgaaaaagaaagatggaaaactatagtcatgttatgacctcaattattaatacctaaaaatgtgcccaaatgtatcagcagttaactcttaaagttatttctgggttataaagtgatgagatattttgttttcttctttatattttcaatattttccaagtcatatattttctatttgatatatttatatagtaaatatatatttaaatcatttaaaataattaaattattaataaatatacttaaattatacatttacattaaatatatatttaacagattatatatatatatccttactatatatatttatgtgttaaaaataaatatatcttgtataggggctgggtgcagtgagtcacatctgtaatcccagcactttgggggaccgaggctggcggatcacaaggtcaggagtttgagaccagcctgaccaacatggagaaaccccgtctctactaaaaatacaaaattagctgggcgtggcggctcatgcctgtaatcccagctactcgggaagctgaggcaggagaatcgcttgaacccaggagatgcaggttgcagtgagccgagatcacgccattgcactccagcctgggcaacaggagcaaaactccgtctcagaaaaaaaaaaaaaaagataaatatatcttgtataaatacatatcatatatcatatacagataaatatttatctgttaaatatatatttataaacatttattgtgagaaaagaaagtacttcattaaaaaaagtctatcgccggctgtgcgcagtggctcacgcctgtaatcccagcattttgggaggccaaggcctgcggatcacgaggtcaggagatcgagaccatcctggctaacacgatgaaaccccgtctctgctaaaaaatacaaaaaattagccaggcgtggtggcgggcacctgggtgcgtgtagtcccagctgctcggggggctgaggcaggagaatggtgtgaacccgggaggcggagcttgcagagagctgagattgcgccactgcactccagcctgggcgaaagagcgagactccgtctcaaaaaagaaataaataaatagtctattgcctaagaataatatcctattcctcatttctcctctttacacattacacaccccactaactgtgtgttctagattcacgcatctttgtacctatgcatatgctgttctctctgtctgaaatgtctttcctcttccccctcatctgtcagatcccaaaagtccttctgactgggctcagatgtgattcttcccggagaccttctcccaatcttccccaagttgcagtcatctcttcacactggcttctctttcgttctacttttcatagactgtacattgaatggttacttatccattgtatttctgatagacccagtagatgataccactctgaatgatcagggatgtttttgcttctcttgatagttattgcacgtatcttctacccctttgtctcacttaaagcaagtgagccaaggtttttgcttgtaatgctcttgttcttattttcatttcttagacaaatatgaacttcagtcgtatagaatatgagagctgaaaagtgattctttagtttaaatatgagaaaatggagacccagagatacaaataagacacctagtatgtttgggtttttcactgctagaattcctatgtcctgttctcacgagggggcagcttgggcttgaccgagcaggagcttcatggtcccacacgtagtatgacatgtgacctctgcacattgtttacagttcctaaactgtgatttctttttctgtgaaatagttataatagtaagtggctaccaagtagaaagtggtcatggggggtgaaggttaaacacaataacggacacacagaacttacacagggcattttatgccaagctatattgaatatctatatccctctacctgcccgtcaatgtcatgaatattgacaattcactctagaccctgctagaagaatccaaagaaattgacagtgagctggaagcaatgactgagaaattacagtacctcactagcgtgtactgtacagaaaaaatgtctcagcaagtggcagaactgggacgggagactgaggagttgcgacagatgatcaaaattcgtttgcagaacctccaagatgcagctaaggtaaaaaaagaaaaaaaaaagaaacagaaaaaaatgtctatcattgaaagaaaatggcaatgccactatggaaatagtgctcacctgtgatgtggtttcttgactgtgatgttattcttcccctatggctttgaacttcaagtacaatacattgatattgactctctaggatatgaaaaaatttgaagcagagttgaaaaagttacaagctgccttggagcaagcccaggcaacactgacttctccagaagttggacgtctcagtctcaaggagcagctctctcatcggcaggtaagccaaactaacttggagtaaatagggacagggacctatatttttaaaagaggatagtaaggaaaaatgcctcctaaactcaacactgttttattttttttaatttatttttaaatagagacagggtatccctatgttggccaggctggtctcgaactcctgaactcatgtggtccacccacctcagcctctcaaagtgctggggttacagacgtgaaccactgtgtccagcccctaaactcaacactgttttaaacattttttttttttgcaaaatgtttataacttgcaacgtaactataatttagtgccttttgcttatgaaataaatgatttaaatattaaatttttgaactatgaaattgcattttcagcatttgttgtctgagatggagtcactgaagccgaaggtgcaagcagtgcagctctgccagagtgccctccggatccccgaggatgtggttgccagcttacctctctgtcatgctgctctgcggctgcaggaagaggccagccggctgcagcacaccgccatccagcagtgtaacatcatgcaggcaggtgcagggtacccacaccagtagagcaattgctgatgaatcatgggcttcttttcttagcattgtgtgggctcagccatcaaaacacatccagggtgttgaatctgacaggctgttgtggttttataaaataaggagattaaaatgctgtcatttggatcacccacaaaagcctggggaatgctatataaaaaatatccttggtgaaaattatcttttagtgatatttttaaataaataacttgtaaagattaattttctatgcaattacatgtttttatctcttattattcacctgagaatcatctacaaactgataatacaggtttactgttatcttgtgttacagagtttttttcatatttcagcttattaaagcattaaatccattttcttttgagtgcctaaaaaaatgcactcaagtataattcttagtctctttgcctagtaagagaaaatcatttaccaggaagaaatgacagtgtttaccttatgtctcccttcaactaataattcttgctttatccaaaaattgtatcaatagcatctcactaaaatcactagtggctcatttggtcaactaccctttcctccctgttatcttgtaatttgttggacagaaaattcctgaggctaaaagtcattcatacttcatatgtgtatatacttttgtttggtagagatgggggtgtcaccatgttgcccaggctgtattgaactcctgggctcacatgatccagccaccttggcctccaaaagtgctgagattacaggcttgagccactgcgcccagcccataattcgtatttttattccctaccgtagcacttagataagtgtcttacctatatattcagtatttgttagatggaaaaatgaaataatgtttcccacactgcttcaccctttctgaccgtcatgttccatcttcaggacgatatcagtagggaaaagagagagaaagaatcctaaccacttaactattttgattccatcaataattttgctacaacattttagagagaaagttctgaaatatctacataaagtgaggaattcaaaccatctaggaattttacccatcatttctttattccctacctgtacaggtaaataggagttaaactacagaatcacttacctagttattgatagagaaaaaaaactgtctatctttctgttttttttttttttcaaaggaagctgtggtacaatatgaacaatatgagcaagaaatgaaacatctccagcaactgatagaaggagctcacagagagattgaggataaacctgttgccaccagtaacatacaggagctgcaggctcagatttctcggcatgaggtgagaggaatgtaggcgaaataccgagggcaggaaactggcttgattagagtatatgtttggtttctagagaatggaagagaacagtttcccctgtcctgcacttaatgtgttcaactcttgagaggcctctttggctatctaagcattgtgagtgccgtttttgttgattcagtaacacgtgcgttccccttgattccataacctctctacacgttgttcgtattatatcctttgggacccactgattatcatctcctgcacccagaattctcacagttaatacactaaaacacagtccataccctgtttttaatgcctacgagaaacagcaacgcttaaagctttgctgcattgatctctgtcttggtggctcactcctgtaatcccagcactttgggaggccaagatgggtggatcatgaggtcaggagatggagaccatcctggacaacatggtgaaaccccgtctctactaaaaatacaaaaattagctgggtgtggtggcatgcgcctgtaatcccagctacttcggaggttgaggcaggagaagcacttgaacccaggatgcagaggttgcagtgagccaagatcgcgccactgcactccaacctggcgacagagtgagactcagtctcaaacaaacaaacaaacaagacttaatattttaaacattttcttctttgacatattagtcatttcagttcctctccccaaaatcagaggatggtccaggttgtttactttgctaattttcagattgggccagctaacatgtgcctcgttttcaaatgttctttccttgttcctttggcatcattatgaccttaggacttgaccactccttgtgcagtccctgtcccagacatcatagtccttgagtgattgagcttagcagggaatttcctttcctgacctgtcaattccatataggtcaaattcactctttcccttgggggctggttcatagcactgtgaattttggtaaataactgggagaaggttgtcttattttttctgtactaaggatagagtatatggaatatatccttccatatgctctattttaactttgtcatgagaaaaatgaacaatttttccaaaccactcacattgagattctcaaaagattcaaggtattgctttgtaaggatgaaaaatctcaccctcttctccaaatgcaattaattatttaatttcttgacatctacaaacattaataattttcatttatatatgacttacaaaatcatttaaatatcccatctacatttactccaacaactgtagacatcatctatgttaatgatttttcttacacaatggttaaatgaaagtgttatgtagatttttgaaaccactgtttatgtaggtctatatgttagactatatattacatatttattttgaaacgatttttaatcccatctaggaagatccaaaattttgttgtaacaactcttctatcatggtacagatatttttaaaatcttttctggagtaataattgttattactactaaacttttttgttgtacggtttttcttccccaagaaacttgtgctttttttttttttttttttttgagacacagtcttgctgtatcatccaagctagagtgcagtggcaagatcatggctcacagtgggatcatggcttattgcagtctgtacctactgggttcaggcagtcctcccacctcagcctccaagtatttgggactacgagcatgtaccactacctcaggctagtttttgcattttttttttttgtagagtagagacagagtttcgccatgttatccaggttggtctcaaactcctgggctcaagtgatatgcctgcctcagcctcccaaagtgctagaataaaagatatgagtcaccatgcccagccagctttatgttttttaaagtaacttacaaaattttacatcacttttttataccaactctatgaggtatttatttatttatttatttatttatttatttattttttagatggagtctcgctctgttgcccaggctggagtgcagtggtgcaatcttggcccactgcaacttccacctcctgggttcaggcgattctcctgcctcaggctcccgagtagctgggattacaggcgcacaccaccatgccctgataatttttgtatttttagtagagacggggtttcaccatgttggccaggctggtattgaactcctgacctcaagtgatccatctaccttggcctcccaaagtgttgggattgcaggagtgagccaccacgactggccggggtaaggattttttttaaatcatctttattttactgacaaaaaaactgaacttagaaaaaatgacttcctgagctcctaaatctagtaactgattgaaattggactcagtctcagtatctttgtgtccaaattccgtgatttttcttccactgtaacagaaactatctgggctacttaattaaacaaaagagaataatgaagtcccaggaaaataaatgagtcccccaaggtcacagagtgaactcagctcagtcagcagtggactatgtcttcctgactcttggtccagtgagctgtttattttgtcacattttcttccacagttctgaacatccatgttatgtttgttagttttaaaccaactgtgacttagaacacattttcatgtaaaaaatgatgcagtcctgtgtgagcttcattgtatgtataaaacaaacacaggaaggaaagtgctgagtggagaaagcttaactgatgataacatacaaattgggaagagggtttctgcctgtattttctgtcttgttttaattgaatctcaatcttatggtgaatctagttttcttacaaataactttaaaaataactgatcatttatttatgcctaaggaattcaaacttttaaaaataatttttcggccaggtgtggtggctcacacttgtaatcccagtacttttcggaggccaaggcgggcagatcacaaggtcaggagtttgagaccagcctggccaatatggtgaaaccccgtctctactaaaaatacaaaaattagcctgggtggtgacgggtgtctgtagtctcagctactcgggaggctgagacaggagaatcgcttgaacctgggaggtggaggttgcagtgagccaagattgtgtcactgcactccagcctgggcaacagagagagactctgtctcaaaaaataataataataatactttttcaaaagttgcatttaatttgaaaaaaatcatcctgccacttttaaatcataggagaggatactcacacctcttttctttccgcctgatgcggaaagcctgctcatgaataccagagactggccacagagggctgcttgtcttctagcggccactctacctgaaattcctacctttataaacattttcagaaattttataaagagaatgggtaacattaaaccaagtgttccattttattttagtggatttgaccacagcttgaataaccaaccctcaaaggtaatgagattacaagaggtttacacttacagaagcaagtcgtagagtactatttctcagtggaagtcacgtgcattggagtcacatgggctaattatgaagtgcagactgtcatacacctggtaaatcagaacctttggaagtggtgaccagagttgcattttttaaagaaacaatccaaatgagttttgtacacaataaggttgagaattgcagcttaagaaatggtcacttgctgtcagtgtgggcacatctttgcaggatactgtagcagggagctgtgcccagccatgtgattacaaagggtggaaggcctaatactaactctgtctacttcataaagattcctcaaattgccgggcatggtggctcacgcctgtaatctcagcactttgggaggccaaggcaggcaaatcacttgagatcaggagttcgagaccagcttggccaacatgtccctactaaaaatacaaaaattagctgggcatggtggcgcgtgcctataattccagctacttgggaggctgaggcaagagaatggcttgaaccccggagatggaggttgcagtgagccgagattgcgccactgcactccagcctgggtgacagagcgagactccatctcaaaaataaaataaaataaaataataaaaaagattccttcaatttttgtataatggcaaaccattgtgcgaaagcttggtgacttgaaattcaaggagtccagtaatctgctagagctcttttctagtattaactagttgcagtaaatgtcatttattgagtacccacgtgctagccactagacaagatatagtaaatagctattcaatcactgtttttaaaaatcctattaggtttaattaactgcatccccagaggtaaagaagcaatgatgtctactttttaaatccttgttttaaaaattcctatactattaggagtcaagaagactgactgcctgctggctgagttctgctggactgttttttgctccactcggcttcagttgggcaggaagaaacaaacaaaacaacaataataacaaaatgtgtgtgtgtgtgtgtgtgtgtgcatgtgcacacgtgttttgcatacagtcagccctccatatccataagttctgcatccatgaattcaaccaatcatggatggaaaatatttgaggagcaaaaaggatggttgcatctctgcatgttgatcttcttttcttgtcattattccctaaattgtacagtataacacctatttataatgcatagcatctacattgtattaggtattattagtaatctagagatgatttaaagtatttgggaagatgtgcataggttatatgcaaatactatgccattttacatcagaaactggaatatctgtgaattttgtatctaagagggttcctagaaccaatgcccctcagttactgagggatgactatgtgtacatatgtgtgtgtgcatgtgtatatgtgtgtgtatatatatgaatgtatgtgtatgtatgtacacaattattttaaagacattacaatttaatatttttgtcacaaaatgtgttcttttttttttttttgagacagagtctcactctgttgcccaggctggagtacagtggcacaatcttggctcactgcaacctccatctcccgggttcaagcaatttctggctaatttttgtatttttagtagagacagggtttcaccatgttggccaggctggtcttgaactcctgatctcaagtgatcccctcgtctcagcctcacaaagtgctaggattacaggcatgagccactgcacccggcccacaaaatgtgttctatgtgcacaataaatgacagcctctgaaacaaagaagccaaaaaaaaaaaaaaaaaagaataatagttttgtacttttaggaatcatgttttgaaatatgtattttcgttttttaaagatgcaataaagtataattttaatatttgatacttaaaatatttaagcaagaaagtaaaactttaatattttagaattaccatactcctaaaatgaatctatagttacctttttaagggttatgtgctatccagattatatttccaataagctcttaataaaatatttaaaacctctatctctcataatatattttttcattcttgtctgctcaaaaacaaaaacaaaaaaacaattattttttcaaaagcaaatgaaattaaaagacactaaatccgaattgcacttcaagtttaaagttctagttaaagcctcagcaacatttgagacatgatgaagtgagcaagaaaaaatttgatgaatatacaaaatttttttggggggtcaatctgcattaaaaattgggatttccatatgcaatatctagcctatctaaaaaaaattcttagagacataggaacagacaggctattgagtatgtgaccctatgtaaaataaatgactgtcatctctgttgaatgtactcagtagggtaagagctgagccttgcattttttttggtgtggttttagccatcacatgacctaatttccatggcaggaaccatctggtaaatttcagatgctttctgcttttaaagaaagttgtcagttcctaatgttgcggaagttcatgattccatatggggcctctcgcgattagaaaccactcattcggcctcatcccctcatttctccttttgtaccgacgcggggacgcgggctcgggcactttggctgtgcctgcgccgcgccgcgcagcctgcggtctggctcggtagcgagatgcaggaggactcgccgcctacacatcctgcctcccgggcccgcgcggctctgcgcgctcattggctcgccctgcaggaagatgaacgctactacttctgtttccttttgatgctgctctgacaccccggtgggggaaatgtttcctcaggagctggcgcagaaaattaagggctaccaggagcagatcgcttctttgaattccaagtgcaagatgctgacgatgaaagccaagcacgccaccatgctgctgacggtgaccgaggtcgaggggctggcggaagggacagaggacctggatggggagctcctccccacgccttcggcccacccctctgtggtcatggtaaggatccagtgggtccccgcggctttgctctttgactggagcctggcgagtggctccatgttccctctccgtggctgatttcagggaccagccttcgatcttgcagattcagagggaggaacagtttccttaagtctctttgactaccgttgggccgggccaatctttgacactgtaaacaatgacagttaaaatgaaactatgtgctcgagacagctgaattacttaacatgtcagaggtctaccctgtatttgtttataatttcgcaataatactgagaggctctgagctttaaacaataatttacttgcacagtgttttagttgtctgggggatgggaaattcatggcatatatatttagttgtggtctccacgctaactagctaactacatatgtgcatgtactctactgtataaatgtgtaatacaatttagaagaacagctattgttagaaaaatatgaaaacagaccgtctaaagcttggctttggattaaaataaatcaactttgttattttctattctgcaccactattttcctatacacttgccatctaaaatgcattgagtattttggtgactataatgtttcccagtgctgtgtgttttcccttatatgtgctgtgcctcaggtaatgagtaaccatacctgagcccatttggcaataacagtactttgggtgcatttatcttcctaccatatttgaaacttgagatgtccacaaaagaccaagctttatttcacagaccttttctcatttgtatgattcgtgatttttccagttatttataaagccacaaactctccaaagaaaggaaaataatgaagtatttaatcaacaacaaaacttcaatgtcatatgcacccccatccctgattgttttacaaatgattactagcatcatattctcttgaagacagaacttttaaatactaacacaggattaatatgtgaattcgggtcccagtaattttaaccttcgttttataattaactctgttttggcctgtgcctgaacaggacttatgttaacatagctaattgattttcatgtcctttgggctacattttacgtggcagatgactgcaggtcgctgtcacactttgctgtcaccggtcactgaggagtctggggaggagggaaccaacagtgagatttcctctccacctgcctgtcgctccccttcacctgtggctaatacagatgcttctgttaaccaggtacctcccagttggcattcctctagcaataatctctgggcagatgcaggactccattctctgtttccattagatcgtgggtatgaatctcagactttgttgcatttggttccagggacacactattaggtgttatagttgcacaaactatgattgtcatgtgtctcagtatgtcatctcctctcctgggctacagaaagtgggatgaacaaaaattaggtcatgggaatgatagcccagaaggctctgttttaagacattatggccttagtttccagcaatcatctggaatggggttctgcatccaacagaaaataaaagatgtgtgtcaccattgtaaaataacgtgattcgatggctttataacatgcattgaaaatagtgctggcatttaccagctcagattttgaagacaggaaacttccatttattatgtcagacttcttctttatttgcaacttgtgtaccaatgtaaggaatgtctgccatatttatactagaatgcctactagatttgagtgtttaacttatctttcaataatcttaaattttattttctataaaatggggaaaataaaataaccatttagttataagaagccttttaccatgtattaaatgtagataatactaaattaaatgtcaaaaagcttttatgtcaaatgttagatagaaatcaaaaatatgcctttatagtaaccaaagacttttaatgcatgttaagtaatactttattttttagtgaagacaactaaaaaatgtaaactattctatgaaattacattttttcaaagaagttgatatgtattattaagggagaagcattaaacagagcaaatgttttataacctgtattataattcaattatattacttttattttaaagcagaagcattcagactgtcataggatttctgtgataaagagaatcccccctcattaaaaaaaaaaaggaacatcaaggtgatgaaacctttagttaatacacttacactgttctcttggtaaaaatcaggatagctctagggaaattatcaactcatccatttgtcaagtacattctgacacctgctcagcgtgaaaccttgtgttggttcctgaggatgcagctgagaaggagtcagcatggccctacctgcaaggccctgacagtctagagagaaaggcagacatgggacagataataacaatgtgatcagaggaaactaaaaacagcaacataaaaggagaagttcagggagccgtggggaatttgggaaagtgtttttcaaattctcattttaaaatatgtattactcattctttgatgatttgtccttccctatggttacagatgttattacagaaattaagctatagtcggctgattattatatagaaaaaattgttctatttaatatggtttaggttctcaaatttttcaaactgaataataaatacttatttgagactttgtggaaaaaatataccttttctaaaactgtaaatctccatgctacttcttgtaaagtgtcaaaggatacatgaaagtgccctaaaaatgatgaaacatgcaaatatttctattattatttcttgacattaaccacaaagcttcatcaggtcctaaaactcagtgagattaggctttgttttaattcttcccctctcccctagtcacaggaaaacatcaattaaattgcattgttaatctaaaatacttacatgtgatgctgcaaagtaggggaaaatgcctttacttagattaagacacacagctttactctgagggagctgttaaaaaggaaatgtattatgcttggtgttcatcaaacaaatcaaccccatcattacggccacatgttatttttgtatagtaatgtcagttagaagacaatgaaaaaatatgacaccatgaccggtgatgcactggatttataaaattgtctcttgaaactgaggaggacatgtaggatccccttaagtttcagttttcagattaaaaaccctgagttttgtgcacagaatgtgtacagctgtttcagggagcagccaaatagaactgctttataaaatcacagttgttaaaaaaaaaaaaggttttgtgcctgctgttcctgcaagtagatctccgttatataactacctggtcccactcacagtgtattctgtctctgacagtagctattagctaaaatgtaataacagtttagcttacttgaaggtagaaataccgaggcattcctagattttgctgtaggcttcttgattccccttagaagcaagccaaggcttagactctgcagaagagttgagggaggaatacatttgaaaagagggagcaagagtgtaatgggaaaatcattggccttcaagttaaaagctcacactgagttgcagctctttctcctctaagctgagtgcacctgggaagtcccttgataccctcatttgtaagtgagaagcaatactacttaattcacagcattgtgaaaatgaaatgtgacatgaatcgtgaaagtgctttttaaactagaaaatactgatcaaatagtagctacagttgtccaaatttatttccttaggaatctactcataagtcttataacttaggcacataagcaatgagaaacgtatttgtaacagtgactcctcactacatcaagtattgactttagtagttatttatagtactgagtgatttattttaattcaatttatgtatgtacctcaaataaatagaaattattcatctataaaaggtgacatattttcaaatccttttaagaaaccaggagttgtcattcatatctgtaggcatgagccacgtgcgcgcacacacacacacacacacacacacacacacacacacagagtgagactgccagaaaaaaattatttgtaataaatttattttattctagctcttttgggagccttctgtatttataatagagtatctaatgtaaaatgtttacaccatttaaaggcattcctgcttttccttatggacagtaatagtattactttacatgtatataaaataatagaatttatataagtgcatttacaagcatgatttattatgaacatataggcctgcctgttatttgccaaacactccacaatgtgctcaggatgaagacgaaaagcagtgacccagacagcccttagggagcttacagtgtgtgtgaggacaggcaaatgcttacaagagaaggtggcaggtagtgtggccgagggcagtacagtgttgtgggagggcctagagaaggcacctaaactggctggagtcaggcagaggtcaaggatggccccctttagttttaagggaggagcacagttaggcagttggagtgcagttgggtcgtgtgagatgaagattttcaggcagaagaaaccacctgttggaagctgtggaggcgggaagcaaaatggcccatccaggcaactgcaaatagtttcagtgtaattggagaaacattggaggaggaggagagggggaaatgagactgagagggatatgggaaccacatcatggaggccctgaatgccacaggaaggaatttcagcttcctccagaagctaatatttaaccactgagggaatttaatgagaagctgtgtacagaactgatacttctggatcaatgtggacaggagaatagaagtgtgcaaattcagagccaggggagctgttagaaacagaagttacacagtctcatgcttggtccaccctggtgataaaaatgagagaaacaggccaggagggactacagaggccaggagggactacagaggcctggacagctcctgctccacataaatgaggcaatgtctcctctgttagcattactttaacaaagacacagggcccagtgttaccataccttgtggtttgcaaaacaagctacgaatgtgaattttaatgaaatctctctatcttcatgaagagagattttaaacaatttaaaacattgtataagccacactaaatatgtgcaggtcagaggcagcccacaggctgccagtttgcaacctttgagttaggaagctgttactgtaatgagaacttgaaccaaggctgtggccaggatatgcatcgttagcactccatcctcccataagcagtggatgttaagggggaggagaaatcaggaataaatcccaagtttatagcttaggtgagaagacattccatttattgcaagatggataatacttcattgttttttcctaaattggttccttttggaaatgttgactttgaagagcctacaggatatgcatgaacatctggatatgtgagtctggagcttatcaattcaccaatattggcgagtgagtggaaaacaaactataaaagagaaagagtgaatgactagaaagctgggaggagaacagagagattttttagaaagtgtttccggaaagggtttgtcagtgctattgaatgctagaggtctggcaagggaagggatgaaaattcatcattttttgtcaaagagaagaagctggtgagagcaagctctgcagtcatcaggatcaaagtccaaactggaatttagaagtggatcgagggtgagaaagtcccatgaaaatcaccctttcagaagttggattatgaaatgaaagggagaaaacaaagaaattaggatggagcctgtgtgtgcaagtgcattcacgtgtgacgatccgtcacattgtgaactgtggactttttagaaaatgtgatatccttcaagaaaacaaataaaagaaacagtgcgtgcaggtgtttttggatggaagagagaaagtcaacaaagccagagaggatgttaatagaccaagatccttgaaaaagcagtttatgggattctcagagtctgtgggagagtcaggtttaagcagtgaaactggaaagcataagataagggtgagtgtgaatatacatagacttttgaaaatttgagaagttgcagtatctccttgacagcttggattgcatgtgtatgtgtgtgtgtgcgtgtttgtgtgtgtatgtgtgtgtgtgtgtgtcagtaacacacacacatgcataaatgactctggattgagtcatgtttgcgggtttccaagtggatgaagtaaaggttaaaagagcaagagaaacaagagtcttggcaagaaaggggtttaagtaacttcagacataactacaagtccagctgagcgatgacagcatacaagggtgtggaggactgaagtggggtgggagtgagtgaggatcaatggatctaaagctattaaggacatgaagagtaatccactcaagacagtgacagggttaggaataaagaggaagcagtctccatgttccaatatcatcaataaatgttggggactcatctggagacctcaggaacaacaacaaaatgggtagaagctgtcatagtcactcaaatattatttcatataatcctcaatcccacccaagattggaccaatgagtgaaccagtgtgcaagatataagttatttgctccaattatatagctacacaagaggagaatttcgctagaatctcagctgtcccagtctgaattcattctaccgcatgacactgctacatttgtttctcagacggctggagcctttttcaatactttttaccaatacatgattctcaataagactcaggtattttaagctgacataattcccttcaacagtacaactgcaaaagcaatgaactttataatagcaattactcccccaattaaatttctactgaaatacagataaataaccatagaaacagttaaaaaccatctttactatatctcttgatatatctttactatatctcttgatatagtaaattttatcagtacaaataaaatatgtaatgttataataggtttaaaaaatttgaaagcatgatatttcatcattcactttgttttttttgtgtgtatacttttaggaaatgcatagaaaacctttatattatttgtttcttagagtagtggtaacttccccattacatttttcttatttaatatcaaaatatttaaattaattcagcaaatgatgaacccacagatagtgaagatctggctgcatctgtagatttaattttatttaagtcaagtagtttttaaattatttaaaactttaatgaatacattcgacaacattttaggaactagatcattaagattctctttttttgctattctaatcaacctttaaatacatgtgtactgcttaaatcctttgtatttccatttaacaaacatagaataagattgagttttggcaacttgaaatattggtaaagttgttttttgatatatataaaccaaaattctgaaacaattacagtgtgctttgatacagtctttacatttttcttgtcacaagagtttactaatttactagtttgtagtgccccatgaaaggtgtagatctgaaacctttccttgacatgaccaacagtacccagagcatattaatctagactttgtctttttgtttaattcaatactgtgctttgcactcacaggacattgcatattaccaagccttgtctgctgagaggttgcagacagatgctgcaaaaattcaccccagcacatccgcatcccaggagttctatgaaccgggattggagccatccgctactgccaaactgggtgatttgcagcgttcttgggaaaccttaaagaatgtggtaagtcttcaaggtggactagtttatgcccaccagacaccagtaaccttagcgattgtcttatgaaatacatgcagagagtttacatatccagtccacagttgagtaccctatgttgggccacagaggtaaagcactgaagaaagaaatgttgtaatctgaaagataaggggctgggaagcatttggtaatatcccttttctggtgtagatcagtgagaagcagcgcacactctatgaagctttggaacgccagcagaagtaccaggactccctccagtccatctctacgaagatggaggccattgagctgaaactcagtgagagcccagagcctggcaggagtccagaaagccagatggctgaacatcaggtacaaatagccatgacttcagtttcctacttgattgaataaggcactgttgtgactggttggcctgtcaggcatgtgtttgagacagccaggtgactttttaaaaattttttaaccttatcagttcttccagagtaaacaagggtcctaatggtggtcatttctactactgattcagggagggatctgagaaaaagagagagagggagagagagagagacatgcagaccttgaatctaattaaagaaagctacatgcatttatgttgctttttaactttgattacacaaaatgtgtttccttagagttgccaagttattttgattttgttgtgagccattgttgtaagaataaaatatactccaaatctaccttttctcgatattgttgttttaagaaacttagccagggggtgcccctccattatcacttcagaaaatacatctcagacttcataagttctaagtctcatcttgtgattgtccctgacttaaatcattttttaaaaggttaaactaggcaaaatattagctttacatgaaaaacagagatcattacattaatctaatgcagaaagataatgttaaaaatgtgtcaatttaaaatgcatgctaagaaatgttcagaaattaaagtctggttaatactttagcagtctaatgaggtacgctgttaaaattatatttattttgtataactggggtctaaggatactgaggcacacattctcctacatattcatcaccgtgaggtaggaaaatgctgcctggctgggacaagaacccaggagcatgtgacaatccttcagaaggcaggaggaaagaaagatatttttagatgttaattaagagctatgaaagcatggcatggtaagcatgtttatcaacacagggtaacttaacagctttaggagtgaaacgttgtactttgtctttcttctactttacatctttctagttttggaagcaggataaccttggaatagactgcctgttcatatgtgtagtcagataaagttgcattcttttgcagtatatatctttcagtataacataaaaatgagaacatttcatctagagacagcatattgagaaatagtggtttcaggttttttacactcttgtgacttctgaagatagagatcgaagtgcatagcgtccatttttaggccttattttggtaaaaaactaccttctgtaggtctttctgctatcccacagtcacccacccttagccacatttgcagaggatgctatgaaagcacgaaatgagaattaacccttgttatccaagaccagaccaatcaggaggatggtcaggggcttgggggactattccaatgccatttacttctgagcttcccccattttatcactagactgctagtctcccaaacccctctcctttctaaaggggcctcagtgtctcccagttctctttagctgctacttcagttttctgttgccagcggccacctctttctgatctgaaggggtgtccctgttgctccagtgtgctccctgtggctcctaggtcttccttgctcctgcggttctgtctgtccagctgttccctgcacctctgcttcactgtactggaaggagccagagagcttccttcaggttgagtatgtgctcctcaggccaacctcgatggctgttctgtaggaggccccgttctttaagcattcagaaggaatatagtgtaaattatgcaagggctggattagagtgcatttgagagtcactcactcagattatcagatgacgatgttgcagaaagtttaagtagtttgaccctctctccagcttcaggacatctccacctttgttcaagcccccattcttgtggcccaggaggctgcccacaattgccaaagacccatcactggctcccacaatagttaggagctgcatgaaaacaggatactggtggcctgctctgcccttccagagttcgtacatgaaaatgcaagttagcttccaatcagcaccaccaccctgttgctcaggcattaggatggaaacacacataaactgaatgtggagcaaaatgatgattctgttcaagggatttaatggagacaactcaaaattgcacattaattctgataattataaattagaagtgaatctgtgacttttcttgtcattaaggccaaccacatgactttttttccctttctaagttggtagtagtcgtactagccatcacagcagtaaggaggtacagctaatttagtgaagattaccagtcattggggcttaatggtttattaagagagaaaatatattaatatatcatattaatataattgcatatattaatatatcatattaatataattgtatatattaatatatcatattaatataattgtatatattaatatatcatattaatataattgtatatattaatatatcatattaatataattgtatatattaatatatcatattaatataattagaacatattaatgttctaatgagagggaaagaaaatagcaataatgtagaatttagtatataatttcatgtatcatcacatatttcatctgagctatttttgctaccttttgctgtctgtgccagaagttctacaagttctggaacacagctgcccacatgaaaagctggtggtatcacagtatctaaatttgttcttagcttcaggaatggtactttaaaaatgtcaagcactgttatagaattactatttctaaatttcaactgaatgggtgtgaggaagtccagtatggttttttatatttcctaaaaattaatagaaatactttagtttttatttctttcccaacactctcttggaagtattcatgtttttttaaggaggtaacctaattcctacatttttcctttaaacacttgtctaaactactgaatttgtgtggaatgctgtgcctttctggttatcctctctaaattgtcttatagatttcttttttttgagacagagtctcagtctgttgcccaggctggaatgtagtgacgtgatcttggctcactgcaacctcacctcccaggttcaagtgattctcctgcctcagcctcccgagtagctggaattacaggtgcttgccaccacgctggactaatttttgtatttttagtagagatgaggtttcaccatgttggccaggctggtctcgaactcctgacctcaggtgatccacttacctcggcctcccaaagtgctgggattacaggtgtgagccaccatgcttggctgtcttacagatttcattttaaggtttgaatgcagttcatgagctgacttgtggctgttgtactgactgttaagccctctgtcattgcgaccttattatcatgggcatctgatgctttagggacatgtgttgccacacaaagctcagtgatatatagcgcacagaggtctgtggttattttgttttgttttgttttttcatatatgtaacaactaaaatagaatgtgagaagaactgtggtctctcatctgatcttggaagttaagcagggttgggcctggttagtacttggatgggagactgcccaggaataccaggtactgtaggcttaaaaaaaaaaaaaaaaaaaaggctgggcgcggtagctcatgcctgtaatcccagcactttgggaggccaaggcgggcggatcacgaggtcaggagatcgcgaccatcctggctaacatggtgaaaccccgtctctactaaaaatacaaaaacttagccaggcatggtggtgggcgcttgtagtcccagctacttgggaggctgaggcaggagaatgacgtgaacctgggaggcggagcttgcagtgaaccgagattgcgccaccgcactccagcctgagcgacagagcgagactccgtctcaaaaaataaataaataaataaataaaataggaaacatttcagcctggccaacatgctgaaaccccatctctactaaaactacaaaaattagctgggcatggtggtgcacacctgtagtcccagctactcaggaggctgagacagcagaattgcttgaacctggaaggtggaggttacagtgagcagagatggcagctaggtgacagagcaagcttccatccccctaaaacaaacaaacaaacaaaaacttgtgttcatgtagacagttctgaaggtcacataaggtccgtgtttcttttcacccttactattaaagagtttttatgttagagaagctcatggaacttctctaagctatgtaagtgtcatacacatgccaagtttgcaattacaaatcagaaacccaaaagcatgcatttcatctctttctccttatcttgaatcatatattgtcgggtagctgctggccaccagctcttatactcagagttatgggactgaagacatatttgatggctaaattttttttaattgaggtgaaattcacatagcataaaattaaccattttaaattgtacaatttagtggtattagtacattcacaatgctgtacaaccactgtctctctctggttccaaaacatttttatgaccccaaaagaaaatctcacgccccccctgagcctggctgctagatcttgaagttaaaaactctagctaccttccaaaaatgtccactcatctttaagagtaaactcaagcatgagtggagaggactgcttctaacaagatttaagtgaggctgggcacagtggctcacacctgtaatcccagcactttgggaggccaaggcaggtggatcacttgaggtcaggagttcaagaccagcctggccaacatggtgaaaccttgtctctactgaaaatacaaaaattagctgggcgtggtggtgcagcctgtagtcccagctacttgagaggctaaggcagaagaattgcttgaactcagggggcggaggttgcagtgagctgagatcgtgccactgcactccagcctgggtgacagagcgagactgtctcccaaaaaaattaaaaaaagatttaagtgaacagttccagattttcctaattcctttattactgactgcagaacattcagagagctatttaagaacattgtgagttttaaatggcagctgataccttcagtgcacacctggttggtcaaagccaatgagatttaatgaggtagtgctggtgagagttaccaacacatcaaacagaaaacagaaatctgcttgtgggctacagttagtggaaagtaggttaaatgagatctaacaaggactttgaggagacagagtttgaaaatttggaatggcaacaggagtgggtaggaggcactataaatgtaaatgtgtgtggaaaggcacagaagagaggatgagaatgaacacagtgtgaaattgttaggaggctcttcttgcttgtacagaaggatcagtgtaaaaaaaaaaaaacaaagacataataagatccatctaattatggaggagcatttaaaatcaaaccaaatatagattttatacttttagcattcaggcacaaaacattattatgaaataatggaaaataatttactgaatggaagtttttgaatgtataatactttgaatgtataaaaaatactttgcatatataataaacaatatcagtctgtaaattcattgcaatcacgttttaaaaattgcagcaagttttttggtggaggttgacaagctaattctaaagtatactgcaggctgggtgcggtggctcatgcctgtaatcccagcactttgggaggctgaagcgggcagatcacttgagcctaggaattcaagaccagcctggccaacatggtgaaaccacatctctactaaaaatacaaaaattagctgggtgtggtggtgcatgcctataatcccagctactctggaggctgaggcaggagaatcacttgaacctgggaggcagaggttgcagtgagccaagatcttgccactgactccagcacgagcaacagggtgagactctgtctcaaaaatagtaataataataataaagtatgctgcaaatgtgtgggaaaatatatattaaaaatgccagaagtaaagaataaccaggacagtcttgaaaaagattaataaagttgaaagatatatcctaccagatagggagatttataaagctacaataattaagattgtgtggtatttgcacaaacagccaaatgggttgatggaacagaattcgagcccagagcagaatcacatttatacagacacttgacttgtggcaaagattacactgcaaaacaatgggtgaaaaaaagaagaattttcacctctttctacactggacatgaaaattaagtttatgtggtttgtagatctaaatgtgaagttattaccaaaaaaaaaagtttgaaaataatactttaaaatatctatggtgaatgatctttttaaaaaacattctaatccatcacagacggatactttagtaaaattaaatcaaatgctgcttggatgtcataactgtcaaattactataaaagtttcttagcacttgctctcaatatgtttatctcatcataagccagtaacaaacattgtgcagactgttattattctgtggaccacgctttgagtagcattcttacagaagataacgtatgcgaatgtattctatttatgaccttggattaggcaaaagatttcctatatagtataccaaaagccctaacaataaagggaaatattgattctattagaccatgataaaattaagaacttctttccatcaacagatattattaaggaagtctcttcccgttaagggaaaaccatgcctcaaagtgggaacagattatttgctatatgcagaaccaaaagaaacacaggcactcctatccagaatatacaaacaactccatacatcaataagaaaaggaacaactctagtggaaaatgggcaaaagatttttagcaggcagtcacaaaagacactcaatctcattagtcatcggggaaatggaaattaaaattacaatgagattccactattaaacccactagaaaaacttaaagtgaaaacaattcacaaccaggcgacagtggaatatggtataatgataaaaatgggttaactctttctccgtgcaacaaaatgaacgactctcacaatcatgaaaggagccagacacagagcagtgcatcgtgtatgactccatttctataaagctcaaataagggccaaagtcccctgatatttacaagttaacacagtggtgatttttgaggacagcagtagcaagaaggaggaggtcaaaagagcttatagaatcctggaaatattccatttcttgatctgggtagcagcagcatggatatatatagttggtgtgcttataatctgttcacttttctagatgtatataatattaatagtttatttaaaaattaattgtcatgatgatatttgatattaggaaaagataaggggtttttgctgtttaacattgtgagagcccactctgaggaggcactgcacttacagtgaagcctccagtcctgtggaaaagataggaattatgcaaataagggcacattggaaactatgaaatgctggcaaatataaagcctatgttactttacttgaaatcatagttgccgctctggtgatagagcctgtttttccaacttcattgaaatcctaaataacaatttctcctgtgaagattccatctaaagagcaagtcataaaatactccaaaaaagagaaataaaatcaagtataattatgatagacaggaaaacagggtgctatgagagagaatgatggagattttcttaggattgggtggtcatgaaaggcctctctgaagatatgacaattaacctaagagcaaaggatgaatagagccatctcacacagagcgggaagagtttttcgtgttgagggaacagcatgttcaaaggccctgaagccaggaagtgactgaagtggggccctggagtggctgaagaaggctggagtatggtgagcaagaagggagtgtggcacacgaggcaggaagagtgagactacacgagtgtagtaacaagtttgatttatttcacagcaagaatccagtacatatttcaaagcaggggagtgagaggacctaattgatattttcaaaaggttgctgtaattgcttcatatagactggactggagcaacaagagtgtaagcagatagactcattagtagaccattatatagcaactcagtcgagagaggaagttgactttggcttcaggtgggggcagtggggatattcagatatacaagatatatttttgagataaaagccattggactgggtgatggtttggatctggtgagtgaaggagaggaaggtgtgaagagtgattcccaagtctccagcttgagccataatgagaggtggtggaagacaggcggggaagcaggattagacttaacactatgcagacacccgtgaactaggtaagttgaatacacagcctgaaacttagggcaggtgtctgggttagggatgtacctttggaagtgctcaggattagaaagcatttgaaatcttgggaatggaagacatcacccgggagagacccttattttttagagtttggtaaatgagaaaaatgagtagtgtgacgacatagaaataggttacaggtttctcccatcctgtgagaaaccatgtgagttttggactagagttcaatgctgtttcagatttggggaaagcaacaggttaatgtgggaaaatcatgttgaggaagaaagtaatacattttattttcaacgttgtattggagactcttagaaatgattgagaaatgtggtggctcatgcctgtgatccaggctggaggattccctgaggccaggagtttgagaccagcctgggcaacatagcatgatcctgtctttacaaaaagtaaaaaaaaaaaaaaaaaaaaaaaaaaattaccaggtgtggtagcacacaccagtcccagcttcaagcaggagggccgcttgagcccaggagttcaagattacagtgagctgtgatcataccactgcactccagcctgagtgacagagtgagactctgtctctaaaaaataaaaaataagttggtattacagatgatccttgtattacagatgatcctattgaaaactagaaagattaattaagttgttcaaactcactttggttagtgatacatacataaaatcagaaaagtcctggcctttcatttagaaatgtaggtgagtaggctgctatttgttgattgattaatgattcccaggtgaaatctcttccgctaatcccaatggatgtgagactcagctagtgctaatgatccctcagtgaagaaatgaatacatgagtgtgattccacagtctttcctccaggcattgatggatgagattctcatgctccaggatgaaatcaatgagctccagtcctctctcgcagaggagctggtatccgagtcttgtgaggccgaccctgcggagcagctggccttgcagtccacgctcactgtcttagccgagcgaatgtccaccatcaggatgaaagcctcggggaaacggcagcttttggaggtaaccaataactgtaaagtggcctcctcacttctgagttaacttttaacgttgtgttaccaagtatgtgggttacttacgtatttacattttcattgcttccctctcctaagctgggattgtgtttcaagaatggtctccacggccgggaggggtggttcacacctgtaatcccagcactttgggaggctgaggcaggtgaatcacgaggtcaggagtttgaaaccagcctggctaacatagtgaaaccctgtctctactaaaaatataaaaatgagccagacatggtggtgtgtgcctgtagtcccagctacttgggaggctgagacaggagaatcacttgagcccgggaggcagaggttgtggtgagccaagattgcaccactgcactccagcctgggcaacagagcgagactctgtctcaaaaaagcaaacaaacaaacaaacaaacaaaacaaaacagtctcccgaatagagtacagtcagtgtgtagccatgaatatgtcctttgactcctttctgactcatttcaggcgtgaaatattgagaatgtggaaagcaaattcttggtagacatgagccttgtgaagaataattgtagaggatttgcataatggtttgctatgtttacacgacagcatttgatggatgatattactaacactataaagaataaatcctacttagtcactgttagccaattcagacatagtaattcatgaaaatactcttgctattctggttcccacgttacttaatttaaatattatttaatatagagacaaatttgggcagcagtaatatctgtgttaaaaatcagctatcttccttttttatttgttctctcgtaaattcttggccctaagcttctaggctactcatattgttgctcctgtagtttggttagactggaggctccctaaagacctttacagtatctatcatcttgtatctcttagcagcttctctggcacataatgggttctcaatacatttcttattatatgaactgaatattattttatttagctgctaattacaccataatgcaattaaccatgaccctgttgctgggtgtgtagtctctctctagttttacctattatatgattagtcaaataatatattcatatattagatttgtgcaaaagtaacggcaaaaatcacaattacttctgcaccaacctaatacttcttgtattagagaaatttaaagccgatgtgtctgccctacttcttaatttctattttaaatggtttaataaaattaattttaaaataatgaattattcataaaataatttttaaaataaagtatttagagtattttaaaagttaacttttaattcatttatattgtccccagtaactctatgaaaaacttgtgggggtttcaaaatgaagcgattgacgtcgatttttttttcaacatgaattatttgcaatcattgaaaaactcagagagctaacctagaaatttggatttctccctttactggagatgaaagttaacactgggccaccgcttcccacagggatcaattgcctgaaactgtatgtggctgctgttttagacaggccgcatgtttttcagtttgccacagtctccatcactccctactcttcccagaaatagaggtccggtgtctactgccatttaccaaccgctttatgccattgttttgttctaatccttgactgatttccatcatttctattactgcctggtcctataggtatgttatttgagaataccttgttcaactctaggtacacattaaaatcactagggagtctttttaaaaataccaattttgagactcacccctagaaattctgattgttgttctgggatgtggcctaagcaaaggaaatttttaaaagttttaccagtgattcttatgtacagccagggcctggaaccattgctttactgtgttaaattctcaagattttaccttagcgtgatctatattaccttctactgaattcaacaggagaagttgaatgatcagctggaggaacaaaggcaggaacaggccctgcagaggtatcgctgtgaagccgatgagctggacagctggctcttgagtaccaaggccactctggacactgcgctgagtccacccaaggagcccatggacatggaggcccagcttatggactgccaggtaccaaaatggtctcaaaggaatatgtcaacatcatgaagcacatttttttaaactacagaaaacatactataaaaaggcttggtgtggatatatgatttttcccaacccatagactttatacatttaaagaatagaaaagtaatacattataaaagcttaaatgaaatccaaacttggactcactttttgaaaaacattgaccacagtgtctccggcttcctaaaggtcatgtttaaaaactgtagataccaaaataccataatatctgtatttagtacttattaaggaatacaaagccaatggggagaatcagtagcagtgagtcagactggaaataaacacaacaggaagtatctctaggtgctctgttacaattttggttctaatcctgatatattattcggaaaacttttccaagtgtcagttttaggcaaacagggagactgaagatgggaaggctgtcttttggagcagagaatgtgttttccacctatgttagggctctaggaattactgtgaggagtaattgcattaaagtctttattctaatgctattttcttacctctttattatggaatttttcaaaaatgcatataagtataaagaatagataatgaagtcccatatgcttgtcatcaaacttcaatgatgatcttcatatttgacttcgcacatgggtgaagtataccttaaaagctttttcattttattaactaggaaatatctagaaaaccctgtctagtcttcagggttaagtatcaatatatacaactttatattccttttttttggactcagaggaaatatgtgaaaatcattacttagtgcacactaacttttttcttaatttacggtacaccattttggctattcttatttgtgatttgagattcataatattgatcattatcattcggattttttaatgctttaggaaacttatctatgtgtatccaaagcactgttattctttgccatgatgatagagattaattagccatatgcaagtttttctgctctttatatcttctttctaatgtttattttttgagaagaaacatctattagcccattgccttttggcacttgaagttaccacccaaactaacatttcaaagttatgttttatcatactgccacctctctcttgtgaagatatctgtttttattgtaacacataaagtccataaaccaggtaatgtatttcaatacttttccaaagtattaaaatagtgttttgaccatactttaagacaggggtgttcaatcttttggcttccctgggccacattggaagaagaagaattgtcttggtccacacataaaatacactagcactagatgatgagcttaaaaaaaaattacaaaaaaaaaataacattttaagaaagtttctgaatttgtgttggctacattcaaggctgtcctgggccacatgcggcccatggtccgtgggttggacaagcttactttaagaaactggaaacatattaaatcacaccagaaaatagtttttaaaaatctaatattaaattactacattaaattaattcaaattttaattagattcaattaaaatcttacatataagccagctaaaatcttgtcagttaaaatctaatatgaattcagttgcacactaattataacggtgactattacacagaattggaaccacgtgatgtcctttgtgggtctgggcacttcatttttgtaggctgtttcccccatggaagtgctaaaaattatgttttcagttttacaattgctgtggtacaaagacttacatgattcggaatagatttgttgtgatgtattccatattattatattcagtttttttcttttgattttaaaagaaattaaaatcaaacattttcttggggctctaaaagcatcacagaccctcagcactgtacttgctgtgcctaatggtaaaatcaaccctgcacagaattatgttaatttcttaacaataatcctcaggaaatcatcttttaattcctattttaataaaagtattactcttctacttagttctagttttttggtttgatgttatattcttttttttttttttttttttgagacaaggtctcactttgtcacccaggctggagagcagtggtgcaacctcagcccactgcagccttgacttcctgggttcaagcaattctcccacctcagccccgcaagtgcggggagtacaggcacgtgccaccacgcctggcttatttttttgtattttttggagagacggggtttcactatgttgcccaggctggtctcaaactcctgagctcaagcgatctgcctgcctcggcctcccaaagtgctgggattacaggtgagagccaccacacccagcctgactttatattcttaattttgattttgtatagggaaatgaagtatcttttctcattaacaaattactttatttaatataaagaagaaagtacatttcaaagggtgcagaattaacataaaaacaatgatttataaggaaagtaaaacttttttttgtttttttttttagtcttttttgttttttgttttaagtcttatctaggaagaagaaaggctatttttctttttctctaatttagtctccattttagaggagaccttgtctcaaaaaaaaaaaaaaaaaaagaaaagaaaagaaaaattgagaggctcaggcaaattttttatggacccctctaataccataacagacaattaaaagtcaccagacacagtggctcacacctgtaatcccaacacttttggaaggctgaggtgggagcattgtttgagcccaggagtttgagaccagcccaggcaacaaagtgagaccttgtttctgttgaaaaaataaaaaatttagccaggtgtggtgtcacatgtctgtgatcccagctacatgggaggctcaggcaaggggatcccttgaacccagtagatggaggccgcagtgagccatgttcatgccaaagcactccagcctgggcaacagaacaagaccctccctcaaaaaaaaacaaaaacaaaaaagggccaggtgcagtggctctcactcctgtaatcccagcactttgggaggccgaggtgggcggatcatgaggtcaggagatctagaccatcctagctaacacggtgaaaccccgtctctactaaaaaacaaaacagtagccgggcatagtggtgggcgcctgtagtcccagctgctcgggaggctgaggcaggagaatggcgtgaacctgggaggcggagcttgcagtgagtcaagatcgctccactaaactccagcctgggcgacagagtgagattctgtctaaaaaaataaaaataaattaaaaaatataaaaaaaaagcctacagactacttactcgtcaaggccgtgggaaaactacaaaaaatcatgaaagcctgtccgtttcgtaaaagactccaaagggctgtatttcactgtgggaaacagtctttgcagaggctggggagatgtgtgagtttcattcttatttctgttgctgcagaatatgctggtggaaatagagcagaaggtggtggctttatcagaactgtcagtccacaatgagaacctgctgctggagggcaaagctcacaccaaggacgaggccgagcagctggctggaaagctgagaaggctcaaggggagcctgctggagctgcagagagccctgcatgataagcagctcaacatgcaggtgagggttccagccgctggcccacagctgaaagttggcacactgttcacgtgctccttctaaggtttgccaggtaaaggaacaggttggcggtgacgcgtacttgtgtgtgtacctgctttacgctgacattttagcatgcagctttaagtttacactcttggactttggcaaacatttgcaaatagattttgttaggactactaacaacagctgttcagcggagtggtggaggcaaaaagcactctgacatgaaagtaacaatgagaggagaggaactggagagggaaagtaaaggctactccaggagtgttgctgtaaagtggtatatagaggaatgagataagctataaggagaagtgggtcaaagaaaattttatctctttttttcttttacattcatcacaatttgagtatttcattttaagatcagaaaaataataagtttacacgttgatggaaataactcaatagaggaaaagttggtgaaaaaggaatgtgggcagggcgccgtggctcacgcctgtaatcccagcactttgggaggccgagacaagcagatcacttgaggtcaggagttcgagaccagactggctaacatggtgaaaccccatctctgctaaaaatacaaaaaaaaaaaaaaattagctgggccttgtggtggacacctgtaatctcagttactcgggaggctgaggcaggagaattgcttgaacctgggaggtggagatttcagtgagccgagattatatcactgcactccagtctgggcgacagagcaagactctgtctcataacaaaaaaaaaaaaaaaaaaaaaaaaaagaaaaagaaaaaggagtgtgattgcaagaacaatcttcttgttggggaggaaacggataggataaaaagtacacaggccaggtgcggtggctcacacctgtaatcccagcactttgggaagccaaggctggcagatcatgaagtcaggagatggagaccatcctggctaacacggtgaaaccccgtttctaataaaaataccaaaaattagccgggcatagtggtgggcgcctgtagtcccagctacttgggaagctgaggcaggagaatctcctgaacctgaacctgggaagcagaggttacagtgagctgagatcgcaccactgcactccagcctgggagacagagggagacgccgtctcaaaaaaaaaaaaaaaaaaaaaaaagagtgcagagtttggtcttccctacccttcttgctaagtaagccagggaccaaatagtttagaagcccattagctgccccaaccctataagcatctgatggtatcatctgctccttcttgtggcctaatccaaactgtgccttcctttaccatttacacctttctcctgcaataatggttgagaccaggccaatctgttctccaagtaaaatgaggagggagggaaagcatctatgttggaatacaaatactggtaggaagtaggacataaatattgttaacggaaacttcatggaagttcactgtgattgcttctgttttctcagtgtgaggatgattgttaggactaacctatgtattttttttttcggctttttgctgatgatatgattatatgatatggaaaaccaaacttaatcaactaaaaactatttagaagcaatggagaaatttaggaagatgactggcttattaaaaatatgaagttaggtcattgaaaagcataaaagaatccaacaaaaaataaaaattaaaaaatgaagtcagccgagcacagtggctcacgcctgtatccccagcaatttgggaggccaaggcaggtggatcacctgaggtcgggagtttgagaccagcctggccaacatggtgaaaccccatctctactaaaaatacaaaaattagccgggtgtggtggggcatgcctgtaatcccagctgcttgggaggctgaggcatgagaactgcttgaacctgggaggcagaggttgcagtgagccgagattgtgccactgtgctctagcttgggcaacagagtgaaatcctgtctcaaaaaaaaaaaaaaaaaaaaaagaagtcgagaatttatagtttttacatagacaaaaaacaagttagaggaataatgtaatatcccatataaaattttgaaaatgaagagttttgagggattattagtcttatcatatatgtgtgtggatttttttttgtttttttttttttgagacagggtcttgctctgtcacccaggctggagtgcagggacgcaatctcagctcattgcaacctctgcctcccagtctcaagtaatgctcccacctcagcctcctgagtagctgggactataggcgcgcaccacctgcctagctaatttttttaattttttgtagagatggaggtctctcaatgttgcccaggctggtcttcaactcctgagcacaggcaatccacccacctcagcctcccaaagtgctgagattataggcgtgagctaccatgcccggccagtctaatcacatattaaaatacaatattacaataattaaaatagtttggtgttggcgcaataaatatgtgaacagaaaattaaacaataactattccagaaagagatttggtatgtaaaggaatttgataaatattttaggtggcattacaaatcagtggacaaaatatgactcactctgtaaataatcacttgaaacgtgataaactgtattttctaccccatattttacagaaaaatgtatcacaggtggatcaaagatttcaatataaaacttaagtctgcaaggtactcaatgtatgattttttttttttaatcttaggatagggaaaacctttgccagtataccccaaacccataattttatagcttcttttaaactaatacattggcagggcttggtggcttatgcctgtaatcttagcagtttgggaggctaagaagggagaattgcttgagcccagaagttcaagaccagcctgggtatcatagcaaaaccccatctctacaaataataaaaacattagccgggcgtggtggcacacgcctgtggtcccagctactaaggaagctgggatgggagaagctgggaggaggtgggagaatcccttaagcccaggtggttgaggctgcagcgagctatgattgtgccactgcactgcagcctgggtgacagtgtgagacgccaactaaaaaaataaacaaatgggccatggctcccacctgtaatcccagcactttgggaggctgaggcaggtggatcacctgaggtcaggagttcgagaccagcctagccaacatagtgaaactccgtctatactaaaaatacaaaattagccaggtgtggtggtgggaacctgtaatcccagctactcaggaggctgaggcaggagaatcacttgaaccgaggaggcagaggttgcagtgagccgagatcacgccattgcactccagcctgggcaacaggagtgaaactccatctcaaaaatgaataagtaaataaataaataaacaaataaaaatgaaactactacacaaaaataaaaaagttctgtatgaccccccttccccacccccaaaaaagtaaccaaattgaaagacatagacagggaggaatgagtaacacaaaataaaacaaaagacatagacaaacagggaagaaactatgcaattcacaaatcttttgtaaaacaataaggaaagatcaaataatagaatatggacaaaagatatgaagagataattcacaggaaaagaaatataaatggacaatgaacatatgaaaagacgtttgaactctgtgttgggtaaatagatgcaaataaaaaatataacttttcacttggatttacacacttgaaaatgcacatgcaatgtgactttgtaattaaagtcaaaagaaaaggttacacatactaaaactgaacagaagtagaatgattttctagctgtaaaagtagacagcaattcacctagttttgtaaacagctattataggtctaatatataatgctttcttctattttcagtggtgatctctgaatgaacttaatttctaaagaagctaaaataaagggaaagccttgaaagtttcctaggtaggatagcaatcatttataaagctcttattactcccttgccccaccctaccgctagaggcaggtagtaagggaaggggcggcctgatcctcactcacaagcacaagagggattaaacaaggcaggaaccacaaattccaaggtctcgtggcctgggaagggcaaaaccaatgaggggagcaggcccagcctggcccttggcaagctggtctcctgtctaagaagcagctgttactaagctctagctattatcacacaagaatttacaagtggcattgctggatcttctagtttttcaagagatagggaatgtggatttatttctaaagcctcccaacttttaaacgttgacatttaaatctaaaattttaaaataatttgtgtgccaaagaaagcatatccacaagccaggattgaaatctgtttatctttttcccattcattattaacgaggtgacctggggcaagagccttaaattttccacaactttcttacggatcagttttctcatctgtaaaatatggataataatatttaacttaaaaaaattctttagaacatgtggaaaaaataatcaaaaagaaaaaaaacagtgaggatttaaatgcaagtaatacaataaatgctcaaattgcagcagttaaaataattaataacaataaccaactgtttccaaatcacattctttgagacgaagaagcttctgctatgctgaaaggccaggcttgagacttagcgggctggactgagcatgtacacaccactgtggtgtccacacccagcagatcctgcccaggtccacgggaattctttaaactgagtcaagtcctgaccctgcccacattgggtgaagtgtaaatacagaaaaatgtggtagtgttttactacatggaaattggttactgtttatttttaaactatctataaattccatcatctttcatctaatgaagttcccagcatataaaatattactagatcttttaaaataattagagcttcctggaagattgtttttccatctgtgggaagaaaaggagccctgtttacattattattgccatgaaaaggatcatgtccctttatgtagaaaactaaaaataatttggagttaatctgaaattaactaaagttaattgcagaaaacaaatcatccattaaatgcagccctcagcaatgttaatgctctttaattggggcttggatgattcaggagggttggaataccttcctaagtctgtaagcacaccattacttagtgctactgaagctgggagatggtaatacctcttacctccattccttttaactaatttgacttgcatgggtatcagtgaatgactatgcttttttgtttcctatcaaatagactgcttctctatgtgaagatcttaagggcatgtagtaagatctcctgaattacgtggtatcttcatgaagctgggtctttttcacacattatcattcattaaaagaacagagagattgccccataaaataataaaaagctttataaagaaatgttttatgtaatgtttagcactgcccagtcctcattcatcttccaaggaatgttcctggcaaaagtggttactgttctagtatttccaaaataaagtttatgtagccccacccagtggggactggtgacagaaaccgcctaacctctgcattccctaggcatggcagaaaactgttatcacacctcagagaaagtaattaccataattacattccttctggctgcaccttcttatccccaggggaaagagaatgaaatttgaactggattcttaatcatggtttgcttcctgtggtccaagtcttatgtttcacaatgactaaatcattcagagaaaaattcactcactgaaaaactgagtctaaccgcatagaatctgaatatatatctgtgcatataaaagtgaggaagttgttaagacctaacatttcgattgtcagtgttccaaatccaaatttggtgtaaggaacttgagccaacctctctcaatcagaccatagtaactggtgtagaagagcgtgttgggctcagggctcggagaattttccaagggagtcttcaggccgggctctgaaaaacaaatttttgctgaagagaaaagcagagaggaagtggcctggatcccacaaaagcaagtcagcaggtcatggccagggccactactttggcagctggagcagctctgatggggacaactttcagtctcgtccactgatttcttgaggccattttctatgggttccttttgaactgctgtttcaactttgcttggaagaaccaggatcttttagagcttattcttagaaggtggtggagtcttagatgagagagaatctgttttcatgcagaaaatcatggattccagttctgggagaatgcccatccacccaaacttcccatctctaggaaaatcactgcttatctttgagaaattccgcagaaggtggagaatttagtgtcactagtcacccattctgaaggtcttgcaaaatgcaactagcatatattagaccattgcacccccgttgttctacctaaactgcaatctctggctggatcatctgaaaggaaaggaagtacctctgagctcgggtgggctcagaatctgggagaaagttttatatactattacctacaggtttttactgttcatttagcttcaagcaccgacaccgccttgcaaagataaagataaagtctattagacaatttaatcatgagattctaatgaaaaaaagaagaaacagaaaggtaaacagatcccatctatttccctaaaatggtgagtataaaactctgaaaataggagagcgagagaagggtctctgtgggcagttaggttggatgagctggaatggctgggtcccatgttgtgctcagacattgcaaagaacaaccaggggcaggcgagcagcagctccagaaatagatggcaggaggctcctccgtggaagcaacctgtaaaatatccttcctctgccccatggtacgccagccctgctgtcctcttcactgctctgttctctctgaaatggcaaatttctttcaccttagggtctttgtgccaactgttccctgggtctgaatgccctcactctagatctttgcaaggctggtggtctctcgtcatgcagagtgcaattgtctcttctaaagatgcttccttaggcctccctaaaactttctatcccattatcagtctctgtaggccttatcttcagctcagttatctgtttgtttatagtctaactccccaccagggccctcatctggcttccaaaacactcccagcttctagaacagtgtctagtgagtgcttattaagtagtgaatgagttatattgaaattataatttatcctttgacagatgaatctatgtgagtagaaaagctctcattcagaactaatcccatttgatgtgcaacattttagggcctttcaaattccattagaataatcaggcaggaaggatcaactcttgcctaggtgctgagtcattactttggtctttctcctttagtcagactttctccaagccagcttagcaatgggccagtttctggtgatggtgatggagggagtgaagggtactttttcagagatctcacctttaataatcacaccactgacctctcaaggctcaattaagctttgaatttgtaaaatggtaaccacacgtgcccacagtaaatgactttttttaatgtgctaattgatggttctgaaagaaagactcttaaagagttttcatctttgagtacagtctattaattatgtaggtcagtctataaatattattatataaacagcagactctcaaagatagagaattctaggaataatttaaatctatcgccctagtagggtagacacagaaggtttacacagaccagtatcagggatgaggcttcctgcctagttcagtgtcttgggacttgagttactgtggtggaggtgaggctctgtgacatagaggtcaagacctggtctgtgaaaggtggaacagaggatgtccagccggcctgggaaacccttgtttagactccttgcctctatgctgcagtacattttctcccatatgaactgagaatcaaatttaagttcttactgaattccagagagtatgatgccttacagaacagtgaactttttgcttctcaaagacattaaaatgtctttgattaataatcttttagaaaaatttttaggaagattattctaaaaatctttcattgtctggacctggattagagaaagtgacataaggcagggtaatgctttcacgggagagacacaattattgtgggtaatgatcatttgagaaacagtttacctttgtgtgacttaaaaaacaaactcatcaaaggatcttgagttatgtttttgtggaaaaaaaatctggaatatctgatgaccacattggtcagctaaaagactaacctctaaatatatgggttttcccctcaaacagttctatgtgtgattatctgtatgttgttcttgctcctgcaaatgccataacttagatgggttttgtgttactgttttttttaaaaaatgtggtttcacatcccagtggagccactttggtatcattacatagatcacaccaaagtagccttctctcccctttggttaaggttttccggtgtgtagcatgacttgatttctgcctcgttaaaagcagggaacagcacaggagaaggaggagagcgatgttgacctaacagccacgcagagccccggcgtccaggaatggctggcccaagctcgcaccacatggacccagcagcggcagagcagtctccagcaacaaaaagtaaagtgtttcctacctctctctagcttgcagatctgcccagagaagaacctgagaggcatatttcagaaggacagacaagttgcttctgtactaaagacagagtgtctctttatcttctctttgaatgaagcaagatgttggtgtttcagtgtattgactcatgaccactgggatgattggtcatttgaaaatccagtctttaagaaaagcttgtgtttaggtttacaaatagtgtaacatggctctcatcttctttaccagagatacctattctgttttcagatttgccctctgaatctatttaattttaatataaatctcaggaaagccttttgaggtttggtgaaagtgtaagttgcatgtttgttattttttttaatgaatgcagtttgtatttttactttcaagtagatgtcgttacaaaataggattgctaattgttgcctagtgaaacaaatgaactttgatgaataagaatgatttctcattggtaccttaactgtatgtaaaaagcatattcaaatattttattttctcaaataacaagaggatttattataaataatgaagaattaaagccaaatctattgataacctaatttatcaattaagtggagaacttaaaaagccacttttcccaaggatctatccttttagcatgacaatattgattttgaaaaatgagagtacattttgtaccacttgagggcactattgcccggcaaaattttcttttcccattggtggttttttttttttttttaacccccagatttttcagaggtatcctgtatcaaagcaaaagaacactacagagtactttggagacacatttgaatatttacataaacctcatgctttatgcaatatgcaaacttaaaagctcactaccgaagttctctgagaattttatagctagaactatgattgtaggcaataatcataaagtagcaaatgtgtttgcgtttgtcctttcccttgagcaggagttagaacaggaattagccgagcagaagagtctccttcgctcagtagccagtcgtggagaggagattctaattcaacattcggcggcagagacctctggtgatgctgggtatgtttcaaaatgcttccattttctcttcattgtgtttccctgacatttgaagaaaagtaaacatctcactcaaaattttattttaaacatcttctgcaaaatttagtcatcttatttttactttagggtagtaaatgtacctgcattttgaacattctgttgcattgcctgagcatagcgcctgtagtaagcttacttgtttgccctccttccagcctgcgcagcctatctgtccaaagatgctcatgagttcatctttttaatcgaataagaaatgcattataaatgagatgcatgatgtttctaactgaatgattgtatctcactggagagcattctctctgtaagagcttatcttgccctaacaacattctaaaaaataaatgcaggggcccgttaaatattttgaaatcttggtctggagtgaagactttcaaagtcttctacacagaagagtcaagaaaaattaaggaagttggagaattttcaagttgaagacttttatttaaaaggtcatagaggaattgcagcagtgtggaagcaccactatattttgaggcaggtctgagttttattctagttccacgaaggtcactttggaaaagtcactcgactgtgagcctcctctgtagaatttagaataataatccactaaggtcatcacagaagttttgtgataattatgaatgtcaactgagaggatatacaggaaaactttctttgaaatctaaaacataaaaaaaaaagttttcatgcaacctctgtgtttatgtattactaaaagttgtaatttggtagtatcctttggcaaataactttgactccatttcccatttctgaatagtcattttttaggggaagtaacataaaggaggaaatatgtattatgaaggtggttttggaaatattatttgtaataccaaataattaaaaagacataaatgctcactactataaaaaagttgaagaaaattttatacatatataatcttaaccaaaagtgatgtaaccgtatcaaaaaataaatgtatgatgctaagtaaaaatgtgatataaagttgaaagtagagtatgtgtgtagataagaactagaatagaccgtcaataataaaaaaaacattttagagatggacgacataggaattaaactttttttttgcagtttaatcagtgctgacatatgacgtcaatgctgactacgtacagtctgttacatatacacacacatatatacatatatacgaattctgagggcaagtgataggagaataaacaaactaaaatgcaattgcagcagatatattgtgacaaaaaatgtaggaaataggaaggcattcaagaaaaggaaaacaaaacaaaaatctgtgaaagttttgacatggctaataaatatcaatgtaaaagaataggaatgaatagtattatggcatctataagcagggactgactttaaataaccctaaaactgtaaaaattgccttaaaaatataaaggagtttaaaaactgtctgttgtgtatcatgcttaaagatgctgattagaccatgaatatgtgtctgtaataaacccgaagtgagactgtttctttcatgttgattgagccaagacttgccttcacgttacattccaggtcctctaaaatgtttacttatcttgcatagttttctgaatatttttgccaaacaaatattttgacaaagaacccatccagcattgcttcctctctgtatgtatcatcactaaaggagcagaagggatcttctgcaactttattaccatatatatttttttctttccttggcctttagctttggaaaggacctaaatgaaatacaaacaactgtaagttactctttcaaatataaaaaatattttaaaaataaatttgcagtgcagtactggctttctatataagatccactttaaagactacttataaattctttaacttttacacaaatttttaagaaacttcacctttatatgcagttgataacagctcagcctgttttcaagcctttgggtaccaggcaaacaattaaccatgaattaatgatatctacattccaaagtaaatatatatgtatatatatataaaccttgctaggaaaaagcctgatattcagcccttaacttgccagctgcttttctaagactataaatgtgacttggtttgtgtgaggaaacctctgtgggaagggcatgacctactttatagagtcacacatttgccgtgtaaggaataagtactatgttacttgtcgagggttgatggagggtgccttccaagattactaaggaaaaacaactggaaatttgttgatgtcaatataaaaggaaagaagaataattttcatggggaacaaaaggctatgttttaaaaggtttgctactggtgttgtacgtgtgtcaatgattaaatgtaagactataaatattaaatattcctctggttttattacaaatttttatgtaaatacaaatgaattaaaagtgctatactataggctattaccacaaaagaaaaaagcaataaagaaatttaacctcataggaacttcaaagctttttaaaaataatttttagaaaatagaaaaattcagatactaatattatagacactcaactgaaggtatcaattatgttttggcatttttttcactcgccattattttttgagatatatgcatgttgagatatagatctagttcttcattttaactgtttaatagtattttattttgtgaacataatttattcacccattttcttattgctggatatttgcactattgccattgccattattattattgttactattgctttttttttttttttttttctgagacagagtcttgctgcgttgcccaggctggagtgcagtgatgcgatctcagctcactgcaacctctgcctcccgggtacaagtgattctcctgccttagcctctcgagtagctgggattacaggtgcccaccactatgcttggctaattgtgttttcagtagagatggggtttcaccatgttggccaggctggtcttgaactccggacctaagtgatccacccaccttggcctcccaaaatgctgtgtttacaggtgtgagccaccacgcccagccctaagattgctgcttttagcattgtttaaattaacttcctacatgtctctcagatgggaaagattctctgcattatatcctaggagtggaatccctgcatcacacattttaagagttttatttttcttgagacagggtctcactctgtcacccaggctggagtgcagtggtgtgattatagcttactgcagccttgaactcccaggctcaaatgattttcttgccttagcctccaaagtagctgggactaccggcatgtaccaccatgcctggctaatttttgaatttttttttgtagagacagggtctggctatgttgtccaggctgggctcaaactcctgggctcaagtgatcctcttgcctcagattcccaaagtgttgggattacaggtgtgagccactgtgcctggccagtttacagaaattttaagtcttatttctagagacttatctaaagacactgttgtgtttacatttattctaagaataattggctttggggtaccacagagtattatcctgccaacacacttgttattctttttttttcacttgagcaaaacgccctgcatcaaaatattaattaatatctagtattccttttagatgacacggttttagttaggacttcaaaggtcctgaagaatgaagatccgtggaaattcagccaccctaggttgttcctgttttcatcttttttttttttttttttttttttttgagatggagtcttgctctgtcaccaagaagagtacagtggtgcaatctcagctcaccacaacatctgcttcctgggttcaagtgattctcctgcctcagcctcccgagtagctgggacaacaggtgtgcgccaccatgcctggctaatttttgtatttttagtagaaatgaggtttcatcatgttgcccaggctggtcttgaactcctgatctcaggtgatccacctgccttggcctcccaaagtgctgggcatgagccaccacacccagcccattttcgtcattattaacccccatttattgagtggccattatttcccagatagggttataggccttatgcatgtattctctttcattctcataatcatgcaaggtagatactatcttcattttaaagatgagaagattgaggcacagagaagtgaaacaaattaccccagtgtcacagataatgtgctagagggagggtcataatccaggtctgtctcactctaaaagttaaacttggctagccatggtggctcactcctgaaatccacaaatttgggaggctgaggcaggaggatcatctgagttcaggagttccagaccagcctgggaaacatagtgagaccctgtctctacaaagaattaaaaaaaaaaaaattagccaagtctggtggtgcataccagacttgggaggctacttgggaggctgaggtgggaggattgcatgagcccagcagtttgagtgtacagtgagctgtgatcacacgagtccacaccagcttgggtgacagagtgaaaccctgtctcaaaaataaataaataaataagagccataccaatctcagatgtcacattgctgcctacctttaaggatgacactgcagggccttcctcccatatctctctgcactatccctccgtgtcctgtactaccttcctaggtgctgtactgtctctctgtgtcctgtactaccttcccaggctctatacgatccttcctatgtcctgcactaccttcccacgccctgtactattcctccatgccctatactaccttcccacatcctgtacgatcattcctgtgtcctgtactaccttcccaggccctgtactatctttccgtgtcctatactaccttcccaggtcccgtactatctctccatgtcctgtactaccttcccaggccctgtactatctttccgtgtcctgtactaccttcccagaccctgtattacccctccatgtcctgtatcaccttcccaggccctgtactatctccccgtgtcctgtgctaccttcccaggccctgtactatccctccgtgccctgtactacgttcccaggtcctgtattattcctcctcagggtcctctactaccttctcaggtcctgtcctatctctccatgtcctatacttccttcccaggccctgttactatacctccatgccctgtactaccttcgcagttcctgtatgatcattcccgtgtcctgtactaccttcccaggtcctgtactatccctccatgccctgtactaccttcccaggtcctgtacgatccttcctctgtcctgtactacctttccaggccctgtactatttctctgtgtcctgttgtaccctcctgtgtcctgcaccgccctcctgtgtcctgtgttttctctggactcataatcgtaactctccctagactaacacatttttaaggttttgaactaacttttctgctatttgccaaaggatactagtctgtaatcgtgctataattttttattccaaatgttacaattatttttattcaatgcatttttaagtatcccttctgcacatggttcagtttatcaatgagtaggaatatagttgctttatgattggcctaaacatttttgttatttttaaagtgtaagctaataactaaggtaatcttatttcatttgagaagccaggtctggtacacacaataagttacctgtcttatcacttttttgtgcacattgtaaacttagattatttattcttctaatagcgaaaaacctgatgtgttatcccaggagttggggatggaaggggagaaatcatccgctgaagaccagatgagaatgaaatgggaaagcctacatcaagaatttagtaccaagcagaaactactacagaatgttctggaacaggaacaagagcaagtggtatcaaatattttacattatatattaactaatataaaagatgtagagtttatgctgagggattataactgtgcaatcaacttaattttcatgatcaatttcaaactaagacatgacaccaatttttcactctacatttttcttaacaagtctatttcacatttcccttcataattatatatttatatgtgaaaatttatttgatttatagacaatatttttcctcagagatgattaatatctgattccttattagcctaaaccattacattttaagtgccctctttttgtgtgtgttttgcaaacttgaaaaagtaaggatggaaatcaaggatatgcacatctaggacagaaggatttccacaaatctggaactcaattgtgaggccatcttattttccattgccacttccagtatttaataatttcaggagatcttaatgagaaacatattgggacgttggtgggtctagggcagggaagtgaagccagtggtcagctggaatagttatggacccatctgcaaggctggttcctgggagggatactgtgtgctgtcgggcttggttccaccaggcatgccaaatccaagggaattgaagacagcaacagatggttccagataatggctattacttcactctaagcagaagccagggaacaactggaagtcagaggacttagaaagttagagggcaaatgagggagtcaggaacacaagccagcctgggatgcctaccacagctgtggcccagaggaattcttcagatacaagactagtcctttgtcctgggctagcagcgtccatctaggctcattccaagtcagcagtattatcggagtgaattctaaaacctttcctgttgctctgcggaagctgctgtttctctgctctggccagaactagcttaggggctgggagaggctaaaccagaagcaaagggtgtcaataactgtagtgaattggaggagggaaacgctggagctgagaaagtaggcattagaaagcaggcgcaacctgccagagttaaatggaaggagatggtctaaagcagggcttcccaacccccaggctgcagacaggtatgggtccgtggcctgttaggaactggacctcacagcaagaggtgagcggcaggcaggtgagcattactgcctgagctctgcttcctggttagaacagtagcagcactagatgctcataggaatgtgaaccctattgtgaactatgcttgtgagtgatctaggttgcatgcttctattatgaatttaatgcctgatgatctgaggtggaacagtttcattctaaaaccgtctctcccacccccgagaaaccaacccctggtgccaaaaaggttggggatcgctggtctgaaggtcataaggtgtcctgtcatctgtggatagccacacatacgtctctccagagccacgctttctattctgtttttataaaagcacatgcttttgtgaattttctgccccctcactttccctctctggccaggaggcttctttacctctgtctgcagaaatagccaccagctctgccctgggaaacttaaagcactgtattcctggaagcaggtgtcccagaatcgtatccaccctggcaaatggtgccctatactttttgcgtggacctcctccctgtattttaattcatccttcctcaaatccctgataaaatgtcctccagactcatagctcaaattccttgttcctgatacggatcttctggacttgactgctagctctcccttcatattctagtatccctccaatcctttgaataggagaggtatgtacagttctgaatcagggactgcagtcttttctgactatcttaagttagagaaatctacgatatttctagattctgtgcttgcgtattattctccattcataaagcacctgtgtgattcgtccggcatctgcagacctcctggaggtctcatccattacccgctttcatcttcaagagctgcttttgctctcagttggagccgacactccagcgtcctccatgctgtgcttactgaacaaaccttgccctgctgccactgacattccacaatacctggactgttcaaatttaggttcatgttgtgcctcccttgcctttggattagaaataaaagcattgaatgttctttttttaatgacatttttgcatttgagtgctttgtttcagcaatcgctggtcatttgtacaaagtgcctcataggttgttttcctctctgtggtgtgaaaaggtgaaggaaaagagagggaagaagcaatttagctgtcagtttccaggcagaaaggagtgatcatataatgagcacattttaagttctaggtgttaacatcgctaacaacgttgtggtgaggtcaatattatctctactttgtagacctggaaactgaggcttagagagggtcttgcgactaagaagaggtgaatctggaatcaggaagccgatatctctgttacctaagtccctcctctttcatactaccttaatggcaattttgtatcctagaaatacttactagtttcatatgtaaaaacaggcacattttggcctaaagttcactaggtcaaagggcactaacctcttagagcaatttttcttaatctgtttacttccaatgtatttaatgcttccatgcacaacaacctacttggcttcagggtgaaatacagctcctgcttctgagaacctataacccgaataaggaaatagtgcatacatttctaaaaaaaaaattaggcaactatgacaggatccataagcaggaattcaaaggaaacaaaggttaagaaaaaatagtcaaaagttgctatgatcggtatggaaattaaagtagtagattttaaggggatgctgggtggaggatatcccagctgcaatggggaatgggcttggcatatttacaggatcatgagtagtcagcctgaaaggtgaggaggtattttgaaaagtcaaaagagactgatggctgggtgcagtggctcacacctgtaatcccaacactttgggaggctgaggcgggcggatcacatgaggtcaggagttcaagaccagcctggccaacatggggaaatcctgtctctactaaaaatacaaaaattagcttcatgtggtggtgcacacctgtaatccaagctattcaggcggctgagacaggagaatcacttgaacccgggaggcagaggttgcagtgtgccaagatcgcaccactacactccagcctgggcgatggagcaagactccatctcaaaaaaaaaaaaagaagaagaaaaaaagaaaaaggagactgagtttgattgaaaacatggtcaaaagtttgaatgctacaccatatcattgcccttattggggagccatatgtatacctaaaagagtttaggggaaatggggttaataatgaaagcaaagagatcagtctaggagtcttgtatttaggatggattatttcactataggtactactaaaaccaagaagaaaagttgagaggaaagctgtgataagatttctttatgattgctaataactttatttagtcaattttaagaaaaattactctattattttgaaaaactacatatatgcattataataattcgcataatgcagccaagtgcaaagatgaaaatgaaaaggaacaattgtaacaattcccatattctgtaaatcaatttaatctttaaattcctcagtgctcataaccaatcctttcagcatatctttttaattcctaaatttttaattttgatccagctctcaggtattaatttcattgtcaaataacttttttcaagaaaactcaggttctatcatgtttgggaatatcagctagttgcctctatatttgatggacagttttctgtcatacttttatcccttcagaatttgtatttatatctatttttctcttctggcattgaatgacgctttagaaaaatctaacatcagtctactatttttccccttatttattttttgtcattgttctctgtatggatgccagaagaattatttagttttctttaagtttcaacagcttatctaggctatgtttgatgttgagtgttctgctatcatatttttcctgtaacacaatgtactttttttatatttaagaatcaaggtttgcttttttattaattttagggaattttttggcatgatttagatgtattttatgctatatttattatatctctgcttcagggacatcaattatccttgtgttagatcatcttttttctatacctattgacttatttttagttgtactgatctttgtttttttaaaatttggatttacttttcatctgattattgcaagagttttctctatgccagtgattccattttcagcaatgtctgttctcatcctttctgtttctaatttatttatgtcttaatgtcatttatttcataaaatttgcaagccaccttttaatttaattttctttttttataatgtcatcttttgtgtgttttgaaacagggtcttgctcttttgcccacgctggagtgcagtggtgtgatctcagctcactgcaatttctgcctctggttcaagcaattctcgtgcctcagtcacctgaattgctgggattataggcgtatgccaccatacctggctattttttgtatttttagtagagacggggtttcaccatgttggccaggccggtcttgaactcctggcctcaaatgatctgcccacctcagcctcccagagtgctgtgattacaggcatgagccatcgtgggtggcctgctttattttatttgtatataatatttgtacatatttctggtgtatagtgtgatgtttggatacatgtatacagtgtgtaatgttcaagtcagggtaattagcagactcatcatctcaaacatttatcacttctttgcggtagagacattcagaatcctctcttctagctattgagatatacaatatgttatagttaactgtgtttgacctcctgtgtaatagaacaccagaacttattcctcctatctgtcagacatttttttccactgcttaaaaaaaaaaaatccatccatggaaacattgccattgatgcatctggccactgtgttcagtggacatggtatgttgtagaagttatatttctctagaagaaattttcatatggacagtgttttcagcatctatttcagtatgcatttccaaatgagaatactgggacataatgcatatgctcttcaacaagctgcctttgtttgcctacagctttatagcaggccaaatcgactcttgtctggtgtgccactgtacaaaggggacgtgccaacccaagataaatctgcagttacatctttgctggatggactgaaccaagccttcgaggaggtttcatcccaggtaaggctgtgttatcagtgtgtttggcttggtttataagagtcttgttttgcttgtattgatttgcctggcctctgtgagactgttgcatccacccctgagcatgagacccaacactagtgataagcgctgaaacaaagatcactggaccctggagtcccatcctatttatttatttatttatttatttatttatttatttattttttagaccgagtctcactctgtcacccaagctggagtgcagtggtgcaatctcggctcattgcaacctccgcctcctgggttcaagggattctcctgtctcaccctcccgaatagctgggactacaggcgtgtgccaccacacctggctgatttttttttattttttttatttttagtgaagacggggtttcaccatgttagccaggatggtctcgatctcctgacctcgtgatccgcccgcctcagcctcccaaagtgctgggattacaggcgcgagccaccgcgcctggccccatcctgtttcctgttttttattttattttattttatttttttcagagtcttgcactgtcacccaggctagagtgcagtggcacgatctcagctcactgcagcctccacctcctgggttcaagtaattctcatgcttcagcctcctaagaagctgggactacaggcacatgccaccacgactggcaaatttttgtattttttagtacagatggggttttgccctattggccaggccagtcttgaactcctgacctcaagtgatctgtctgctttgggctaccaaagtgctcagattacaggtgtgagcactgcaccggccccatcctgatatttttcctggattttcaaaacactgaaattgattatttgaccctgttttgtgtttcccagagtggaggggcaaagaggcagagtatacacttggagcagaagttgtatgatggagtctcagccacctctacttggttggatgacgttgaagaacgtttatttgttgccacagcacttttaccagaagaaacagagacttgtctcttcaaccaagaggtaggtttagtagttcctgcctgtgtgtgtataacattacaaagcacttgacattttgatgggataattaattttatgcataaagaaagtcaaacataaaacaattctaataatgcagaacataattgcttaaatgcagaatatttatagttcgcattttcattctttgtcttgtgtaagtatgagggaaaaatgggaaactctttgtagaaacactgttatgtatcacaaatcttccaaatacgaaacacatgcttaaaaaaagtaccaaattcctaaatagcactttacattgctcattattactagtgaatgaggtaaagtctctgagagcaacttcctgaaatgtatagaagtatttgaaagaggttccagttgtcttaggtctgattattactaagcagccagagagatctagttgactttctatgagaaaataacatgatttgcatatcaattcatgtatctaaacactgaaaaatgcccttttatcacctctagattcttgccaaagacattaaggaaatgtctgaagaaatggataagaacaaaaacttgttttcccaagcttttccagagaatggtgataatcgagatgttattgaagatactttgggttgtcttttgggcaggttatccttgctagactcagtagtgaatcaacgatgtcatcagatgaaagaaagacttcagcaaatactaaatttccaggtaagtaagatattatcaaaggatacgtgaccattctctaggtattcagtaatagtcagtcacgagtctgtgttacagacctggttgttgtttttctaaatgcgtaatgaagaacaagagcattgtagaaaatgaagggggttgaattaaaggattagaagctaaagattttttgctcctagaaatggaaggttgagaaaaccacccacttcaaactaaggactgaatagaattcaatcaataaaagtcaaatttatggatcattataattataatttttagttactaataccggagtttaaacacattgcgaaagaatatgcagaaaatggccgggcacagtggctcacgcctgtgatcccagcactttgggaggccacggcaggcaaatcatttgaggtcaggagtttgagaccagcttggccaacataatgcaacccatctctactaaaaatacaaaaattagcagggtgtggtggtgcaggcctgtaatcccagctacttggaggctgaggcaggaggatcgcttgaacccgggacgcagaggtagcagtgaactgagattgcaccactgcactccagcctaggtgacagagcaagactccgtctcaaaaaaaaaaaaaaaaaaaaaaaaagagtatgcagaaagtgttggaatatagaaagggccatagactgtagtacctaagagtctttgaaagtggctgtggtctaattacttctacctgtgttaaaatgtgttacgttactttccagtcctaactcctcagacttactgccttttagccccatattataattcttattgtgtgcttaggaaacttttcctatgaatatataccggaacaaatgcaaaagctgctgataaacttttagtgctgatttttcattcctaataaaaagcactctttgagaatacataagttttaattgaatgttatttttaaccaacatgaaagattttataaaatagagacatgtcattagggccaagagtttcatgtggagttttgatttgcaaaaaaaaaaaaaaaaaaaaaaaaaaaaaaaaaaaaaaaaaaccaaaccactacacataaatgtagcattagccaagaaacatggaattttcacgaggcacaaattaccactgccttctggtagtctacattcttaaaaccacagagtaaaaccatcacaaacatttgagtttcatttttttattcacaaaatattttctcatattcattgtctttaatctttgcgacatcctgcagacgttgttctgataataattttgcaaagtcagaacagtaaaaattaaacatgtagtctccaaagctaacagtctgggttcaaattccggctttgtcacttactgctgtataactttgcggcttgacttccatgaaccttggtatcctcaactgtcaaatcaaactcatactcatattaactgcctcatagactgtggtgaggatgaaatgagttgagatgtgtttaaaatactctgaacagtgcctgatacatagtaaacactcagcaagtgttgttattgttattagtagtagtattataagagatacaggatctaaaaccaagagaaagattaaattacttcagtgttactcaaccattaagaactagagccaggattttactcaaagaatatatatatttttgtattttatcatattagggtgatctcagggaagatggagaatgtgggccttcattagagtctcttaaattttatccaatatcctttgccagttgatggtaccaccagcaactcagtcttgtccctgagtcagtggcactgctatctagcagtcttccctgatagttactgcccccaagatgatcaagtcagaatccccgagtgcctcagcagtcccttttgctctcattccccatatcttttgtgaattgcatttagtatctttagtactttcatacttttaaactttattggtaattatcaccagtcacagtaaaatatgaattaggcatgaatgctctggaacttactttgttttaaggatctaagagaatcatggaattctctttaaatcacgttctctatttttcttctgccaacaagtttctatttgttggtggccagctcacgaacaaaaagacatttcaaaatatttgtgttccaatttagttgagagaaactttccaatgttaacataattaaaggtcaagtcacaaactattttcctttttgttttaactttgcaccaaacaccttggtatgctgtcagtcctcagcagttactggaagggtatgccttcattctgcatttaatctttcaggattagcttttgccagactgctaacattattctataccaaaaagactatttggaaggatgcatagatgttatgtagatgtacattacatatatagaatcacaataaagtcaattatgaactattttgtatttcaaaaattttacccatggacgtaacctcaaattccccaaacatataattgtgtattgtaaattattttgaaaattggaaaatgaatgaaagaattctttaatgaatgagtgaggcagcacaactgattttatttattttattatttatttatttatttatttaatttatttattgagacagagttttgctcttgttgcccaggctggagtgcaatggggagatctcagctcactgcaacctctgcctcccgtgttcaaacaattcttctgcctcagcttcccaagtagctagaactacaggcatgcacgccatgcccagctaatttttgtatttttaagtagagatgggctttcactgtatgttggccaagctggtctcgaactcccgacctcaggtcatctgcctgcctccacctcccaaagtcctgggaatacaggcatgaaccactgtgcccggacacaactggttttaaagcttgaaactttctgcaaatctgtttctcaatggctagaatcctgctcctttttgccctgccaataattccagtgactataagaaaaaaaaagtgatgtattttatgtttgtaatatatggataccttaattatcctgttgtatcgcaagtgtaataatacaaaaatagttcaattctttgcatttttatttttatttatttttattttttttgagacggagtctcgctctgtcacccaggctggagtgcagtggcgggatctcggctcactgcaagctccgcctcccaggttcacgccattctcctgcctcagcctcccaagtagctgggactacaggcgcccgccactacgcccggctaatttttttgtatttttagtagagacggggtttcaccgttttagccgggatggtctcgatctcctgacctcgtgatccgcccgcctcggcctcccaaagtgctgggattacaggcgtgagccaccgcgcccggcctgcatttttatttttaagaaaatgtcaatatccatgtgattactagcacctcttaaagtttttatttagtaattttaaaatcaatcatattctttgctttactatcttcttgactagtctctcccaataatcagtctgacttccagaaatatgaactctgtgtttcctaccaccttgagtagaacatagttaagagagaaaatatgctattaaaagcataaaaatgggccgggtgcggtggctcacgcctgtaatcccagcactttgggaggctgaggcaggtggatcacctgagctcaggagttcgcgaccagcctgggcaagatggtgaaaccccgtctctactaaaaatacaaaaaattagccagacgtggtggtgcatgcctatagtcccagctacttgggaggctgaggcaggagaattgcttcaacctgggaggctgaggttccagtgagccgagatcgcgccaccgcactccagcctgggtgacagagcaagactctgtctcaaaacaaaacaaaacaaagcataaaactggcatacaggaaatctatctatgcactcttcatttctaacccatgttatgttatatatacttagctactcatttagattaactggacgaatgtcactatacacacatatgtagataatgtaggcttctgttcaagtgaatgcaggacatcttttactaggtttaaaaacagataaatgtgtgatggttttaatggcccacgtgaccttactctgaacacagttgaatgatacagacctagtaactcatatgtaaaactattgtttctaggatttttccagggctgttattataatttcctatttagttagccactagacttgcagattgctttgagttttggttagtggcaactattctagttctcatgttcagcgctatattttcaattttataatttttactgcataatgcacccattattttgctttttagacctgaatttacattataaagccttcacatgttcttatagatgtttttcttccttggtacgattatccttccactcattagacagtcagaatgtttgcatgttggtgatgtgcgtgatcaggccctggtaaagaggtcctgagttgagctttaacctctgacaaatatatttttgctgactattatgaaatagaacttatttgttgatattttagagaaaaaaatacatttttttggtaattttttttttttgagataaagtcacccaggctggcatgtagtggcgtgatcatagctcacttcaacctcaaactcctgaactcaagggatccttccacttcagcctcccaagtagataggactacaggcatgccactgtgtccacttattttttttttaaactttttgtagagaccgggtgcactgtgttgccccggctggtcttgaactcctggcctcaagtgatctgcctcaggcacccaaaattctggtattacagagatgaaccactgcacctggccaaaattttttataatttaaatattcttctaatttattattccctgtggaattaagtaccaaagttctgatagttgtctcctttttatacaaatctaactcaatataaatatatttggacatttaaatgagtaatatttttgaacaaaatacctaacaagatctttttgtgttgtctcttcacatgtttttggccatcatggataatatttattttctaaacttctggatggcttttttaaagcttgtgcaaattttccaaaaatagaagaagaaactgatggagggagggaagaagaggagagagcaaaatggaaatcatatgattcttaagtatcatattatttcccaaatcaggataacacctataggttatttccctagataagagccactaatataatatttctgtgcaatgtttgactgtgctcatttatttcggatgtaatgagattagggtgacaagcgttgctttttacatgtatggttcaacttcatttgtgttatgtagaaaatactttgggtaacagattcttcaggagtcagttttagcacataagtaaattgttaccagttccttttaccttcccatagcacagtattgtttctcctggaaattaaatttctgtgcctctatgttatttcttagaatctgtgttatatttacaagtattttgaattccctgttacacattttgagttttcccgttgctttcctccttagaatgatctgaaagtgctgtttacatcactggctgacaacaaatacatcattctgcaaaaactggcaaatgtgtttgaacagcccgtagcagaacaaatagaggtatttatagctgccttttcctagaagagaaaatgcatagaggagatatgacttactatgaaattttgaatattctatgaaagattaatggctcacagtggcacttttgtttgtagtatttttgtttttgagtactgggtttgaataacataccaggtgacattgactctgttacttacatctgcacagaactaggaaatgtgagctgggaaaaggtatccatggcagatgctgacctgaaggagttttctgcccaatgatgagattagatatgaacctcaatgacatagggcagaaagtcaaactgtcctgggagtggtactgacaaagcattatgggtactcagacccttctggcctccagcaggggtaggattagggaagctttgtagagggaaatttgaactgaacctaagagtttggacacacaacaacaggaaagaaagatatcacggtaaagaggacagcaagaaaaaaggcacaaattgttagagaattctgagcacttagggaaaaacacaggtaattctattttagctgaatttaagataaatgaaagtgactgaggacaaacaagattggatatgtaaatttaaggcagtttgtagggcctgttgaatgtgtgactttggactttattctataaactagttacctgtacactttatttgttgcatgcctcattagctaaaaaaaaaaggaaataaatatgcagcataagtgtatgtatttttatttatttataaattataagcaatttatgttataaatcacaattaaattcagccaaatttattttcaatttttgtttgtgtacatgctacaaccaaaattgaaaattaatgtggttgaatataaatgaaagatgtggtgtttcatcctggtaaatcatcttgcacactcttgggtgtttagactcagctgggagatccctggccatggaaagttgtaggggatgtttgcaggtaaaaatgaatggcagttctagatcttgcttctggttagtttacatgacagcaccagggtcaggaaacaggagatccatcatgaggcttcatgtagctgtactggagagaaagaatgagaacccaaactggcatgatggcatgaaaatgcagatagaagaaatgggagggatgttagaatatctcctgtttcataagctaagtaattgtgagaagtatgtgttttaatagaattctctgatttaatttcagcgaacttcccgggaatctatggatagacgatagagaataatctgacatataatatgtgtgtgtgtgtgtgtgtgtgtgtgtgtgtgttaaagaacacctctcaaaatagtttgcaaaactgtgagtgtgcatttttctttttatttatttttaaaaatgtgtgtgtgtgtgtgtgtgtgtgtgtgtgtgtgtattatatatatatatatatatatataataaaaaatatatattttaatatggagatagggtctcactttgttgcccaggctggtctggtcttgaactcctgggctcaagcagttctcccatctcagcctcccaaagtgttgggattaccggtgtgagccaccgcatccggctgtgcatttttcttgaccataatttcatctgctttttaaagagatttctcatttctccccatgaaaaatctttttgttttttttcttggcttataatgtatgtgtgattccaaaaaagactggagcaactgtagtgatgtcttgctttggatttctaatatgaattatgagatatgtatgatcacaagtaataatttttactaatttttgaccaatataactgaatgtcacagatgaagaaataaccagttagatttttttctttgaataaatggaatgcaactaatgaacgtgctaattccatgcctacccaacttggattaaaaaggcaataacagcagagggcatggggaagacacacctcactcaatatagtcatctcttgagttgtgctgttccaatccagagcagttctcttgcctcataaacctggtgcacagttgtcttcttggatttcccttcaccaccatcctgagaatcccttcatttcttcctatgttggatcttctctcttctgaatcccaagtctttctctttactgcattgcttccttgtttcgttagtgcatgtcctttcttagaaagggtacatgataagtgtatttttccagatgtatgtctgaaaatgttcttataccatgttcacactttattgatcgctttgctgtttttatgtgatccttcagggtcatttgttgaatatgaattcttttggagtttcaaggctttttcttcattgttttctagctctcagtgttgtcttaaggaatctaaaaacattctaattcccaaaggtttccagtgtcctgaaatttcacaatcacatgccttggggaggatctatttttatccactgggctgggagctcaagggactcttctgatttggcagctctcatctttctgttctggaaaattttctaatgatttatttaatacatttctttcctgcattttacctgtcttcttttctggagaactcctttttgtcagatactcgggttcaacccttgaactgtcttaccaagagacctttctttgtctttttgctccgctttttgagaaacgtcctcaatttcaactccagactcttgtactgaattggcatttctgctctcacgtatttaattttcccggagctcactttggttctccgaatgatcctttttgtagtattttttattttttttaatgaatacattatcgtttatatctttctgggtatattaatggttttttttttgttgtttaaagttctacttttcctgtataatctgttttcctccagcttgcttttatttgtttgcttctgttagtccccatctttcatgtcatcgaaaggcatattgaaatcttttgttgcctattcaggtttaggatggaggactaaacagctgaaagggaactctgtgtgtggatggaacatgataattttaagagttcctgcaggatggtctctatggaccatttatttgttagagaatccttctgtcaaattgtcaggcctgtcttattggtgtgttcagatatttttccctctcatctctggagactagagccctgactgcagcacttcttgccccagggagagaagactcaggggccccacattcagcatgcagggagcatccagttatttcatcccttgctttcagtcaagcactcaagctcacagctgtgtccagtgcccctctgtctgttttaccttctccagagaacacactttcagtcttttacccgggaagaaaaagggacagtatggaataaggaggggcatctgtgggttaactgtcctttaagcagctcttcactaaccctccttacttagcaccccagcttacttcacccagagttccagagatttctgttgctctgaagtgggtggtggagatcctccactggtttagaattcagcttccccagatttcctaagtcaattatcatgtattcttttgacttctagctcccaacatattgttggcattgttttcttttctgttcccttgtccttttagatttatggggaaaaaatatgccagagaacaagcaaacaaaatactcactctgactgtagggggttttcaggaaagagaacattggacacatgtgtttcagctgccatctggagtcttgtttttgtcctccttcaggggcaacctctgttgccctctttccaaacgcctgcttaggctgctccaggatttgtggtctggtatctcccttctctgatctctgctaatggggatgagttgcattatcgagtatagtacttacttatattcagccttgctttatttttctctgtttactctggcttcctaaccagaccatcagctccttgaaggacaggatgagatcttgttctgcttctacagacctcacactgggaagacaaggcttagcaatagcagccacttgaatacttgttgactgattgattttccacttcacaacaaggagcacagattctttgaccatgctgtaatatatgttttgttgcctcgctgaatctctctccaaagatgctcacagctacgtttcaaggacagcagaacatggtcccttagaaaatctcaggcaaatacctttttttaactatgtcctaaatgatgctcctttttttaactattgcttttcaaaactcccttttttgtttaagcaagacatccttctcccagccctctaccctgactttctcctgcctcattatctgtaagataactgctctgtactaatgaggggacttcttctgttttctatataccctctgaacatggctttcgatttgttttattgaaatgattccttttgtatatattgagaatgttttacatggagaggaggaacacagaaagagatacaataatcacatcttccgtggggaaattgttcatgggagttttaataaaatgtcatggatcttacttaggcaatacaacaggctgaagatggactcaaagaatttgatgcaggaatcattgaattaaagaggcgtggtgacaagctacaggtcgagcagccgtccatgcaagaactctccaagctccaggtgcagccttcagccagtagtattcagctgcaggggtacatcaaacttgaagtctagaaaaaatcactttatttttcttggctttctttataaaattcacgccacttaggtcctaacctttctaccaagcaactcttagaaaattttctgaagcttaacatgtttagtacaaggaaatgagttgttttcatgctgctaagattcatatgtttttctgacagttactttattattattctcatggttaagcattacagtatagtttagttgtagcatattattttctactgtagaaaatagaataacttttaatcctacctagaaaaatttaaaaaagggatatctaccctcgtattgcactatgtcttcaaatactattttaaaaagcaaataatcaaagtaatactttgtagaaagtgtttttttctaaggcaagcactatagtttatcctccatatatgtttgaatggaatagagacattgtttcaattctagaacaacaacaacaaaaattaaactagaaggtagttgaaatctaaacagacttcctatcatccttcaggaacagagaataatgctttgggttaatttcctttgctagatctgacatttaggcaagaatctgatattggggtaggaagaagatccttggatattagaccaacaaaatttagcatcaactaggcaagcagttatgttcgatcaagaaaaaattgtgtacaactgtgtacagtcacacagacacacatgttagattttctctgtgtgcagaactattgagaactggtaacctcagtccagtacagggttgtgagttctttctttgagaaaataaaatagaccttataaacaaaagaacatttttattttaactgtatctgtcctttatctaacatttcataatatcataagcccacctcccccactttgtacttttttagacagttttccgacagcacttaagcatcaggtgtaagagtcaaatgtcattgccgtaaataggcattaaaattgaactcttccagattgaaccattttggcctgctaaaccttaatgtgatatgttaatcaggtccgtatgcctcaaataaattttgtgtttggtgtgtcatcatctcctaaaatgtctttccagtttaaatagttatatactccaccacatttggcaaaaatattgccttcttaagtttgaaactctttctgctcacattaaactcccctatttctctagctctttgtttgaggggtagtcccaaatatgattgttatttagcaggaaaatgttaaggatattatattcaattgctctgaaattatatgaatgttgagaatactataaaaatgggaattacattttctatgacatgtccctcagccacatggacagtttttcaacagttttaccccacatcttatcataaactattgatatcctgagaaaacagttgtcaaatctacctcatgtatcatttctaggaaacacttttacatgtcctttaaaatcttaaaatattaaccttattttttatagacatatctttatttcctttcatattttaacttattaaatttttattttgtaatcaatctaaattgcattttgatatgtggcatgagataagactttatttttcttcaaagagttgagttgtttccacattatttattgaatatttattttatcctttcagtgacttcatacttacatttttatgaattcagttttttttcagtttctccgttgtgctttattgtccgttagaaataaaataaaatttaaaacagcaagataagaataccaaataagattaatgaaagaacttgaaccaccaggtatcaagacacagtaaagtcacaacgaatatcataggcatgagaatagaggtccaaaggtcatttctttgtgaaacatgttttcaaagtaaggctcatagaaagacaagcagatggcctacaggtagagcgtttccaggaggcacatccctgaaggcattttcttggttgggtctcgggcttggtgcgttcatagttcatatgcttttagagggttgccagaatatgaattgagagtgagtcttgtggtctctgcttcttaggacatgtatgatgagctgatgatgatcattggctcccggaggagtggtctgaatcagaaccttacactcaagagtcagtatgagagggccctacaagatctggctgacctgctagaaactggtcaggagaagatggcaggagaccagaaaatcatcgtgtcttccaaagaggaaatccagcaactacttgacaaacataaggtacataacaaaaaagagtgatagagagaaaatgtaattggaaagcatgctctcaaaccctgatatatatttagtaaaacctaatattctcagtcttttatgagttcttacttgtataagttattctttaaaaatggccaaaaaatttatattcaaacccactggctttcagtagcacagagaaattataggggatatgtttctataatgttgtaaattaaaaaagaaaaccaacttacctgtaattttacctatcagttcctcactagtattagccaggctttctccctagatgagctaaaatcaaaggaaaactcagagcctctcttcaaaggagcccatcttcattcttaactccacttttccctgtgtttcctttttgcccatttgtccacctggtcccagttgctctctttgccctcccttgtcctcgtcaaggactcctcgctcactccttgctctcctctagaaatgcagagctgactactcagatccagggttgggttggtgtcttttacatgcattgtttagatcctctgacccttacacatatgctcctctagttgctgtagacttcagactttctccctgggaacagcaaggccgtttactatgtaatcaaacttgggaggcccgaaatcactccatcattgtgtgccacagccaagctcaggttggacactactccatggtagaagaatgcgtatttcactcacacacacacacacacacacacacacacacacacacagctcttgcattattggcaatgattacgaaagcaattttgccagtccagaaacccagccttctagactatgggaatttcctgtagggaaactaaaaaaatcccattgggttatagaagtttaaaatcttctaccattgtgtagctctctggtggcttgtaaaggtgggttttttttgtctttttcaaattgtcgttcctattttttcccagacgtttttgtccaaagcttcatgatttattaaaaccttatcatttggctttgaaaacattgctttaaagtccacagctggtgtttctcacgttgttgaccatagcaataaaagatcattctgagttattccagaggggaaactaggatcaatgagtataaataacagggaaataaacctcaatagaaaaagaactataaaaggagtaagctgccattgagcagacagcccttctggccatgagaagtccagccaaggcttttaggggagatgggcttgtaaaaggaatctcagctttcattgcatgttgggctagatgaacttcaaagtctcctccaactttaggactctgatttggtaattgttggttaaaaataatgattctagcttctactcaccagcccattttctgagggagagttctgcagtgctggtgagaagcacagataaagccacactgcccttgggtttgaaccccaagctctgccgtgactagctatgtgaccttgggcaagctacatagactggggggactcagtgttctcatctgtaaaactggaaacaaaactgcctatctcatagagttatagagttgttaggaggatgagatgagtcagataaagtatttatggagtgcctagcaaacagtaagcacataattaatgttaactgtcattatcagttgccagttcttccattttatcatggtactgggaacaggaaatgagataagctcaatctccattctccagggtctattatacacaaacggtaacatttcaaaaacattagtaggatggcgcaaggcctacagttatgttatgtgtaggtataatacaaggaaagcaaatttataatatcaatcagtgcatataaagctgtgcttgacaacatggaatgagcacgcaaatatcctagaagttcagaaagtagagcccaagcccagccatggaggaaggaaagcaatgttttttgtttgtttgtttgtttgtttgtttgttttgagatggagtctccaaccagagctccaactgtcctggcaaagaaaaactcagagcctgtcttcaaaggagcccaccttctttcttacctctacctttccctgtgtttcctttttgcccctttgtacacctggtcctagttgctccctctgccctcccttgtcctggtcaaggactcctcgcgcactcctcactctcctctagaaatgcagagctgtctactcagctccagcgctgggttggtgtgaactcctctccacccaggctggagtgcagtggcacgatcttggctcactgcaacctcggcctcccaggttcaagcgattcttgtgcctcagcctcctgagtagctaggattacaggcacacaccagcatgcccggctaatttttgtatttttagtagaaacggattccaccacattggccaggctggtcttgagctcttgacctcaggtaatccacccacttcagcctccccaactgttgggattacaggcgtgagccaccgcacccggccctaaaccaattttgattctaacataatatatgaatgagttgctgacttctttcttcctgaaaaattgcaggaatactttcagggcctggaatctcatatgatcttgactgaaacactcttcagaaagataatcagctttgcagtccaaaaggaaacccagttccatacagagctgatggctcaggcttctgctgtactgaaacgggctcacaagaggggtgtggagctggagtacattctagaggtgagaccattgatgtcatatcttctgtgctgcaaacttcctgctgcaaaatagacctttaatgcaagatgtatctatccatgcagtttgcctcacataacctcagaactagctgcgctctcgggctcaggactgcacttttcctatggttctgtgttgcttattccccctgtgttttctgtgtacattgggctatctgctgtgccatgtcgaaagtaagatagatacacactgacttcagactatgcatgaagatatttggggttttgatattcagactgatagcttacttaagagtatgaaaaatgtagaaataggccaggtgcagtggctcacacctgtcatcccagcactttgggaggctgaggcgggtggatcacttgaggtcaggagttcgagaccagcctggccaacatgatgaaacaaaccaacatgttgaaaccccgtctctactaaaaatacaaaaaattagccggacgtcgtcgtgggtgcctgtaatctcagctacttgggaggctgaggcaggagaatcacttgaaccgggaggcagtggttgcagtgagccaaggtcacaccattgcactccagcctgggcaacgggagtaaaactctgtctcaaaaaaaaaaaaaaatgaaagtaaaatgtagaaatatttttttctgtcccaaatgcggttgctcttggaacagagtagtgctcagtggtggctactggcaagctatagaaccccgtggaaatgtaggacattattgatggaacagtcccctttctttcttcagtaactgtaccagttgccctaaactgttcctgctttctcattcttcctctttcccttggaagttttagagattataatctctctcccctttgtggacttccccacccactcccacaatattactgatcttaactgggttgcctgcaggtcgtatttgcattttttctaaatgggattttccctgggccaacattttcataggtagctaacccccaaatcccagatgtggaattccctgatgtggaattccctatattttggagagacatctacctttaacgtttgaaatctctgtaataatagttacactttattgacatgtcaggtccctggcaagacttcttacatttacatgaatccatctcatctttatcataaccctttgagatagaattttgaatccctgtttcagcaatgagtctgggagcaactgtttgccaagacacgtggttaattggtggcaaagtcagagatcacaccttcatctgtctgacttcactacctgaaatgtgtgtttctccatgaaacttacctgatgacaccatttaaattgtagccccaccaggcacacacctgggcactccctcccacccctacccagttctgttttattcttccacagcacaagaactctattataccatacaacttattgtttgtttttggtttattgtttattattgattgcctgtctctcctcactagaaggcctgggtttgtgtctgttttatttactcccagatccctaggcattgaaaataccaggcaatagatatttggtaagtgtatttaaaaagcatgggtttctactactgtgccctgttgccactccaactgcacagtgaagtgagcatactcacactgagaaactgctgacccacagcgtaaattactggaaaagacttcaactgatcttttaaaaagtgttttccagttttaaataaaataaaagtctgaacttaggaataagtgatgtggtatttttctttaacagaatatataaactatatattcatatttatagatatgtttcatatgcaaatgtaattgatttgtttactcgttacatgaaaggcaaacatccccatccttttgacttaaatccttactgtggtaaagaataaaaccatacatacctgggctagatgtggtggctcatgcctgtaatcccagcactttgggaggctgaagcaggaggatcttttgataccaggagtttgagaccaggctggacaacatagtgagacccccatctctacaaaaaaattttttttaagttagcctggtgtggtggaatgcgcctgtggtcccagctacttgggaggatgaagcaggaggatcccttgagcccaggagttcgagtctacagtgatccatgattgtgccactgtactccagcctgggcaacagagtgagagcctatctaaaaaaaaaaaaaaaaaaaagtgcatacccaatagaaggtacactgcatacattattccatttaatcctcatgatggagaagatagctattattatccccattgtaacgtatggaaaagaggtacagagtttagtagcttactcacagttgtaaaggggcttagtggcagattccagagcccattcacaatgctttcaagggtcaccatttgattacttgctttaaagccatcttttgcttcccaaagcaaggcccaacgcaaacatctctgatataactttaaggagagactgtcaggcacgtattttgcacccaaggaagaatgtctttcgctaatgagggtttttttagctcacagactcatgttgtgtttctagacgtggtcccatctggatgaggaccagcaggagctcagcagacagctggaggtggtggaaagcagcatcccaagcgtgggtctggtggaggagaacgaggacaggcttattgaccgcataacactctaccaggttggtgttacaagccgccacattgcctttagaaacttaccaatagttttaacagaatgtaaacaaacttgtgatcaattattttattagtacttttacttttctttcaagttattgacattgaaaggagataatgtttctgttatttatagttggacattattaaaagtctttcttttttcttttttttactgagagctctttttgaaaattcagcctccaccaagcattttctgtagtttatgctgatgccacacaattcttgaaataataatttgacagttttaaatccacctaaagtcattaccaaaaaaaaaataataaacaacaaaaggagactgtctatacttaaatatagatgaaacatcttaaagttttcaatgttacttgagtgagtatagtttaagtttgaataacaggtaatgggaacattgtaggtaccagagaaattataattcttaaagacaaaaattgcatatccaaacttttaactcaataatttcaatattttagcatttaaaatctagccttaatgaataccagcccaaattatatcaagtattagatgatgggaaacgacttctgatatccatcagctgctcagatctagaaagccaactaaatcaacttggagagtgctggctaagtaacaccaataaaatgtctaaggaacttcacagactggaaacaatattgaaacactggaccaggtaatacaatgactgttttgtatatttttagataagtgctgcattgtattaataaggctagtgcgggtgggggatgatggctcaaacctataatctcattacttgggtggccaatacgggaggactgcttgaggccaggagttcaagaccagcctgggcaacatagtaagaccccaatctctacaaaaaaattacaaaaggactaggtatggtggcacatgcctgtggtccctgctattggagaggctgaagtgggaggattgcttcagcctgggaggttgaggctgcagtgagccatgatcatgctactgtactccagcctgggcaatagagtgagactgtgtctcaaaaataaataaataaataaggcaagtagatattcacttgaaagtgacatggctcctctagaaacgtattgtatagtttggaaaataaagataagcagaggccaggtgcagtggctcacgcctgtaatcccaacactttgggaggctgaggcgggcagatcccctgaggtcaggagttcgagaccagcctgaccaacatggagaaaccccatttctactaaaaatacaaaattagccaggcgtggtggtgcatgcctgtaatcccagctgctcaggaggctgaggcaggagaatcgcttgaacccgggaaggggaggttgcagtgagccaagattgcgccattgcactccagcctgggcaacaagagcgaaactccatctcaaaaacaaaagaaaagtagaaagtccccacttggattcttgtatactcatataaacatataattagaagtgagcagggaggcagatgcataaggcaccttacctttgagtttcaccctcccttgcctaatcactgtgtctgagatatcacagtaaagcctgagagggagagaaagagaaaacatggattgagaagcagaagcttctcaagggcaatgggaagcattcagcggggtggagggttgatttttacataatgacatagtctgtgtctaagccgcctttatttcaaaggactttttgtaaccatcatctaatattttctaagtagcatcaatgtgaaagagtaggggaaaggtatttttatacccagcttaaagacaggccagcggaaacccagagagacaggcttgataaaggtatcaatatgaagaaaatttcagagtgccaacctcatgcatttttcttctaaatcttcagacctctcgttttaaaactgttggcattggtgagtaacgtaggtgagtagaagatagggatgaaatgtttacttaatggactccataatatacttaacagatatcaaagtgaatctgcagatctaattcactggttacaatctgcaaaagaccggctagaattttggactcagcaatctgtgacagtcccacaagagctggaaatggtccgtgatcatctaaatgctttcctggtaagtctaagaatctaaagcatttgattcaggcctataagttaggcctgacccatacaccagtagaaaagaagtcaggccgggtgcggtggctcacacctgtaatcccacactttgggaggccaagcagtcagatcacgaggtcaggagttcgggaccagcctgaccaacatggtgaaaccctgtctctactaaaaatacaaatattagccgggcgtggtagtgcatgcctataatcccagctactcaggaggctgaggcaggagaatcgcttgaacccggaaggcagagattgcagcgagctgagattgtgccactgcactccagcctgggcaacagagcgagcgactccatctaaaaagaaaaaaagaaaagaaaagaaaggaagtcaaccatcagtggatatacttaataaactaagctatagagaatatattaatgttgactatgtgtgttccataattatgcaaagtaatagggctcagtgactcaacactgcctcttacaagtagttctcaagtcggggcttcgtagtttcctttcattcgagggcaagggtgtactgctttcattttcttttgagtgttcagcataaccccctccaggatgtaaaggaaattgtttcatgcactaaattggtcgctttccttttaatgaatggtctagctatttaaccctaatttgaacatcgctacttgtttcaggagttttctaaagaagtggatgcccaatcttccctgaaatcatctgttctgagtactggaaatcagctccttcgactaaaaaaggtggacacagccacgctgcgctctgagctgtcgcgcattgatagccagtggactgacctgctaaccaatatcccagccgtccaggagaagctccaccaggtacagaaaggattgctttcgtgggaaatagctgacttaagctatttgacatggagaaatacattaatttgcttttgctcacaaatttatatcagctttgtcccagacacctggcctcttctctctcccgttgtattaatattaagagtgaactctggccgggcgcggtggctcgcacctgtaatcctagcacttagggaggctgaggagggtggattgcctgagctcaggagttcaagaccagcctgggcaacacggtgaaaccccgtctctactaaaatacaaaaaattagcctggcgtggcggtgtgcgcctgtagtcccagctactcgggaggctgaggcagcagaattgtttgaactggggaggcagatggagtgagccgagatcgcgccactgcactccagcctgggtgacagtgagactgtctccagaaaaaaaaaaaagagtgaactacgctacaaagccctgccccaaaggcatttcctctgagggtttctttaatgtgtgtatgtgggtgtgggtatgtgtattggaatgtttgtctggctttgtttaaactctgttttgtctcagataaaatgtggacagttacatacacttttctcataaagtgagtggttatgaagatttagaacgtaatatatgttaaaaatatcttatgtataggagagcaactggcattcagtagatgtaaataatcctcttatctgaaaatacacccacctcccctgaaatcccagaacattttatctttatctctctttgacactcatcactgtgtttcaggcaggatagctgtgttttgtgtacatgcctaatctctcctaagcaacagctgtgcgcccccagagggcaggaaccaacccacgttcattgctatatctttcagcaccacacagaagttgatatacaaagattttaaatgattgcttttgttcctccaaatcatcgtaatacacatatgcataaatgtgtgatatgttaagtaagatttcgaattgtaagtagtgtatatcagctaagggctgaggaaattggctatgttcttaggaataaagattagagtgccaaaaactctagaaaatgatagcttgtagtgtggtatttttctttcttcttttaacattcctgagtcataatatgcagagattttacaagataattaataaaatacatctgttgaatgttttctggttaagtttttttagactcataaaactagttataaaataagaataatattctcttctttctggtgctttgattaattagttaatgtttatacagtgtttacagtattggatatcaagtgaacataaaatgactattattcctcaacatttgcctgatgtttaacttcaagctttcagaaagggtaagatctccaaatgtcattaaggagtgttatctctcttggtacatttttaagaattattgtagggtttttaagttagcagaagttggggtttccattttaacacttgggactggttctctccctgacttggacagctccagatggataaactgccttcccgccatgccatttctgaagtcatgagttggatttctctaatggaaaatgttattcagaaggatgaagataatattaaaaattccataggttacaaggcaattcatgaataccttcagaaatataaggtaattaaaattttttgtttttaacttttcatattttcagaccattttatttgaaagaactaaaaaactcaaattatggtaatcaagtcttggaatgtatgtttcctacacagtgaccagataggaattcaatagcaagaaaaatgcattatcagttatagaaataagaagaaatatccagtactaggaatgattttgaataattttgtgttattaaagaattacagaaattataaaaataaatttataaatattttatagtgaggttatataatttatctagttctaaatcttctacctaaatatatatatacacacacacacacacacatacacacgtatatctgtgtttatgttcatataaacgtatacaaatatatattcggcttctaaaaataatgggttgtgtgaacacagacaaattgtgccatttcagctgagttatggaagtgataatattaatattaaggttacttaaggctttccaactcctggaaaactaatgagacatttattgtataatcttattttctcctctttttttttagggttttaagatagacattaactgtaaacagctgacagtggattttgtgaaccagtccgtgctacaaatcagcagtcaggatgtggaaagtaagcgtagtgataagactgattttgctgagcaacttggagcaatgaataaaagttggcaaattctgcaaggtctagtaactgagaaggtaagccagtggcttcccactgtccagatttacatgaaaaccccaagaacaggcacactctgtaaggaagactgggttcacaagtagcgtggctatactgggcaaagaacgcttccaataataccgctgaaggttaatcaccctaaacttcctttaacctgttgatgattttctcttatacattctctgctctttgtatattttatggtgtttcagttttctaaagatgcctcttgatttattttgcctttgcttcaagttgactttagtcctttcttgcttcccagtaatagtcattgattcatactttatgaaattcatttattaaatcaagcttgcccagcccgcgggctgcatgcggcccaggacggccttgaatgcagcccaacacaaatccgtaaactttcttaaaacattatgagattcttttgcaattttttttttttttagatcgtcggctattgttagtgttcgtttattttatgtgtggctcaagacaattcttcttcttccagtgtggcccagggaagccaaaagattagacacccctgttttaaatcatatatacgatgaactgtattttaagaattcttaatttggagaaaatactggctagaataattagtctgctaatgatttgattttattaaaataaagttgcaaatttcattttattgtgtttgttcagatccagctgttggaaggcttattggaatcttggtcagaatatgaaaataatgtacaatgtctgaaaacatggtttgaaacccaggaaaagagactaaaacaacagcatcgaattggagatcaggcttctgttcaaaatgcactgaaagactgtcaggtaacttgtccaggtggctaacatgcaccatctcacaatttcatagcgtatgctaatatgtttataggccttgagagttgcaagttaaatatttttttaaatatttaaaagttgcatttagtaacaaattttgctgattttgtgagtttatagggttttttttaaaatacattaggtttttttcactcgtttttaaaaatttgaaattatgaaaattttcaaacatactcgtaagtagagagaaatgctatgaaccctgtatactgagcatcagatttaataattgtcaagatttgcagcctgggcaacatggtgaaaccctctctctacaaaaagctacaaaaatcagccagacgtggtggtgcttgtccctgtagtcccagctactcaggaggctgaggtgggaggattgcttgaattcaggagatcgaggctgcagtaagccatgtttacaccatggcacttcagcctgggtgacagagtgagaccctgtttccaagaaaaaaaaaattgcctaaattatttctttttctaaaatagatatcatagtaaataccagacatcatgtcactttattcttacatacaatatatatctttgaaaaatagacattttcttaatgcatccatattattatcaccaccaaaagtttaataatttctaatattattttatgttcaacgcataatcctatttcctcggttgtctttaaaatttcttttatatgttaacttattcaaaataaggatgcaaacaatatgcatatgctacatttgcttgttagatctcttaaatcttttgaatatttttttaagaccataacctgtcgcagaagctgttgatgggtgccatgttcaggattggcctatgaatgtccttaagatgtttaatttgttcttctctcctctgtatgtcctataaatggaagttagcactagaggcttagttggattcccgttcacctcctctgaacaagcacttcacagtggaattcctattaattaattattaataatatcccattattaattaataggaagtatccatgttacttccttttttgtcacatggagaagtacacagagtgtgcttgttctactctgagggatgcggattgaaagttcaggtgaagcagtaacgttccaaatgttttccagtgactcagggacacacagtctttccacaggtcttcttgtgtgcccaaaagaaaagtgagctattgcagttaatacagtaataagatttttgaaaataattcatgaattcatatattgttacagattatgactgttcccttatagtgtttcctaaaaacaattgaaaactaaacagtgaagtaattctacagaaaagcttctctctgcaaatcttgtttttctatttcgggtttcagaaagaaagaactttggtaatgatctctcttccaatcattatgttttctgtttgggacacatataaagagaggtatatttaagcacttaatcaaagcttttcggttctgaaaaggaagagaagtgctggctccccagctaatggattacaattttgagactgcataaaattgataaagaaaaacatcgtatagagaataccttgaagtaataatagtttttttatttaataaaaaaaagcctcacatcagaaaatgggtgcttaaagactgaagatgaagaacatgcctcagctagtctcattgcatttccaactttctagaggccagtggtatttctgatttaggccataaattcaaaaatctacaagtaatccagaatttcagctctttacttctgaggacaaaatgtcataacttttgttgagttcctaaattaaaacatatccattgattttgaaaggtaattctgcgtattagaattagcaaagtgaggaccttctggttgcatggttgtgataaactttactgttgaaagactgaaataccacattaataccatttgcattttcttttattttttccacttcttttcttccatactttactttttctctctcttagtatttttttcttctctttaacatagctttttctgccattttccattttgtttcttctcctgttcatttcttctatttaacagggagacaccttaccatctggaaaatatagcagcagcttgaccatgttttaccaagtgtaggacctaagttttagtctttcagagagccaggtcagacagtgtcaggagggaaagcttaaagtgtggttgaaagaactttgtactgatgccggttcatgatttcaaatgaaaagtcatatctttgaaacaaaagacagaatgaaagtagcccatataattattttgggacaacgcatataaataaatcacaatggcctaactggaaggttctatttggctatactacaggtcttgatacaactgtcatttttgagaaattgttttttggaccaaagtgtgaaattcaagccagtatacttaaattggtgactggattccagctttattttgttttaaaaatcttgagtattttcccagtcttttataggtgatttattaatttaaaccaacataaaactgatatttatgaattaatcgaagttaagaatgttttattgtttttaaaaatggtaggtttggcctttcccctttttgatcagaaacagaatcatcttttaattattattgaaagcaagggaaacacacctttattttttataaaatatatatttcagccctgtttccctcatgggttttgctcttctaccaacatacgtgtgcagggcattttagaaatagtttctaagcaatggaacattcatttaatattcctcactgagaaaaagttaacatcatagaaaaatgaggataaactcaatttctaatggttgaattttagaatcatattaaagacatattggaaggattgtttctggtcttttaatctctttacagaaatagaaaagttctaaatagtaaattaattatatttcctatactacacaaaggacctgtaaccccagcaatcactatatttattctctggtaattatcaaagctgtcaaaatagtgacaaaattatagagtggaaataagagaacaatatgaaaaacaaaaatgatcactttaagctgccaaatgcgtgagtgtctaactaattaaccaaaacaaaaatagcttcatgataattcaatagagaaaaataaataaatttgcactgaaacatggcacattgccaaatggctaaacataataatatcttgcatttagctactttttgacagcttaaaatatattttatatatatttacctaattttatctccttggagtaaggagaaaatgtcttattattactattttaaaaatgaggtagagagagattaacaagttgaaccataatagaaacagaaataaaagaggcaaaaattatttttaaagaggcatgacatttgaaattaatataacagagactggactcctcattaacaccttatcagcagcactatccaatttcaatcttattactcatgtatggatcatgaggggggtgaaaatattttttatacaattgaggtgttatccaaagttaaagtatttgggaattttctccattcgaatctccaagaactacaaatctgcttttagttctgagggtatacttctgaatatgggactgtaaccatgccttaatgcctggcttttcatatcaccccaacatgggatttatattccctccacagtctgaggttcagccgactccttctggcatcaggctgggagtccataggctccaaagactgggttctaatccccactccatccctcaccagctcttttacccaagacaggtcggatgacttgatcttcaatttatttatttataaaatgttgatagcagtctcagtctgcttcactgagcttctcaaattttcagatggcattaaaatagaaattagggttatgatacaggttcagtatgagctccagatcttttcttcattttgcttttcattcttgaacattttatactgacaattatgaatgcatatcccaaataaaatgaggatttgattcatcaaagaagcctgaagcctttcagaatcacatagaattcagagtattttagagagagaggatcatacagatgatcttttcccatctgaagtcagtcttctgatttcccatctgaagaaactgagacccagtagaaatttctcacctacccaaagtgactcagctttgggtaggtgagtagtagaaatgtgactaaatctcagatactagggcccagaataccacattcgatcacatttcttcctatgaggtaggcagcgtaactttttgaataccaacatatatgaacttaataatataaataatattacagtttctgacatgtatttctttcctcacagcctcttgagaaaattacatagtaccatttccttatctggtagaatatcaaattttacttttttaaagttatgctaatttgccatgtgtaaaaagatgactttttttttgcatttgagtgtaggaagaagtacttctgcagcgtgcctcttctgaaagagataagctttttggattagtaaaaggtttttaggacatgaaactataatggcccaatttcagtgcaccccagagttccataatagaacaatttaaagtgactattttttaaatctttcaggatctggaagatttgattaaagcaaaagaaaaagaagtagagaaaattgagcagaatggacttgctttgattcagaacaagaaagaagacgtctctagcattgtcatgagcacactgcgagagctcggccaaacctgggcaaatttagatcacatggtaatattgctcacagaaagccagctccaggaccgtgtttgccagctctgtccaaactctgggttttggttttcctaaagtagcagaggaaataatcaaatctatacattatctccttgtacttttaagtccacttcgttatcctcttttttttttttaaagtctagtttctggtgttttctagaataagcctttattttaaacattactctcttaatgatctcatccattcccatggcaatagatcattctcaaacatctgtctccagcctggcaaaagatatacaaagtggatatctgtatctaagtgatgcaaaccaagctaaacacttttctgacagagataaataattatgaggaaggaatatcttagatgttttgtcttaagatatttatctgagtgtgtgtgtgtgtgtgcgtgtgtgtgtgtgtgtgtgtgtttgcgcatatgtgagatagatatggatattgttatagctatagatagatttcactttctgggacctgactacctgtattcaaattgaaatttctcacattctagcagtataatcttgggtaattttcattacctcttagtgtctcagtttcctcatctataaaatggggataatgatcatacctatctcataaggtgttgtgaggattaaatgagttaatgcatttgaaacactcatttaatacaattcttaaactgttttattaaaagtatcaacctcttataacttaaaaatatatatacatatatgtatatatatatacacatatatatgtgtatacatatgtatatatgtatatatatacatatatatatatatttatcagttacccttttaagcatttccacttagaactgagtgtttaaagtgtggaaggcataaatttcaaagttgatacattttaccttttaaatctttttctttttagttttgtttgtttatgatacctgaaaccctgatgaagttcttagatgttaatattttcccatcaattgaatatatattccatcattctagatattatgaaattataagccatatttgtctttttcaaaaggttggacaattaaagatactgctgaaatcagtgcttgaccaatggagtagtcacaaagtggcctttgacaagataaacagttacctcatggaggccagatactctctttcccgattccgtctgctgactggctccttagaagctgtgcaagttcaggtggacaatcttcaggtaaggaattaatttaacacatccttaacgttcattttaattttagaaaactgaaaaattaccaaatggagacatcatcctgaaatattgccatatgttgtttacgtttaattattttttaagatctttaaaattaattttacctgtgttattgttacttgagcaaacttgcctgtgtgtgccaaattctggattagctggtatataactaaatggtttccaagatcctgttgtaaaaaaatattcacatcgtcttttatacaatgattttatgcccaactgaacctccttgattcattgtcactgccttttgtcttccttttctcttcttatctgcatctccaaacatattctaaggaatgttcaaaagaaaacacagagaaaaacggcaaaagtggtaaatgtttaaaccattcagttgcttccattcagtaaaatatcagtggcctatccagcgtgtccacagaatcttcctttctagcacttactgcttggtttcctgtgggtcctttgtcattgtgtccatgtaaaatgatatccctgatgtttgtcttcaacatagcactctctcctgtctcaggtcaccgccctcaaattcctgctgcccccactctcctgtgcaccgggccactctcacctgtcactgctctttcttcttggctaaagaacacagactatgggatgggcagggcaggcccctaagggatgggaggccaacaagagaccagcatgtgccctgctaatatctagtccgcctccctggccagccaatcaaagcttctatgttgctgacctcagatgcagcctgccttcctctcctcccctcttctcccctcccttcccctctccttccctcccctcccctccttcctttttgagacagagtctcgctctgtcgcccagactggagtgcagtggtgctatctcggctcactgcaacctccgcctcccgggtttaagcaattctctgcctcagcctcctgagtagctgggattacggcatgtgcctccatgcctggctaatttttgtatttttagtagagatggagtttcaccatcttggccaggctggtcttgaactcctgacctcatgatccacatgcctcagcctcccaaagtgctgggattacaggcatgagccaccatgcccggccgactttcttaaggaaatattttttttagggtagggtggaagagaggaaggacaaatttgtctatataatttcttaacccttaaattgtcgttactaaggatcacgaaaacttcttctgaggatagtaaatttaaaagcacatcttataactttgaggaggttagaaatgctttttaatttaatatatgttatgtttaatacttgcaagagctgtcttaagacatgaaaggattaagggtcttttccttgactgttttcatttgagggtaatcagatattggtgttaaacagtactcgatttttgtagcctacttcacctgtggagttttatgaagaactgagtctgtcacctcagcactatttccagagaaacaactttctttcagttcccttactggtccttggtagcagactatttagataggcttggtagaagatgccaaacctgtctgataaatattctttgctttaagcaatcttgacatatacagtgcattattattaattatagtctccattctgtacggtggatcactaaagcttatccctcctgtgtagctgaaactatgttccttttgatcaacatctttcttttccccatctaatcccttatcccatgccctggtaactaccattctactctctacttctatgagttcaactttgctagacaaaaatggataagtatgtgaggtaatgatatgttaattatcttaatttattcattccacaatgtaaacatatatcaaaacatcatatagtaccctacaaatacatacaattattatttgtcaattgaaaatcatttttttaagttaaaaataattcttggcaaggaagaacacccagagataaagcttggcaaagctgtgccttcttagagtcttcatcttcgggagtttgtggtagaagcactgcgggtatgtaacaaaatagagacctggctttggctttgagtgtcaaagagatccacagtttggcagatagcacgttacataacaccattgccatggctttgttagaaacaagagcttggggtagcaaggaaaatgagcacttaaaggatttctcagcaaggcaaatttacttctgcaggagggtgccactcacacttctggctgctgcaagagcacactgaacaaaggagagaaggagtttttatccctaacgcagtccctatccctgcatccttcccctgttggctagggttggaccactcaatctaaactgacctcagttggctaagacttaaacttttccaattagggtaaatatgtgattctcaagggagggaggggtaggagtggtccctgtgttacagcacaaggcaagtttggacatgtctgggcaagtcaggacacaacaagagcaggagggctgctcacaggccagaaacaagaaagtacaaggaggtgaggcctctgaaccaaggacaaggacattacacaattaaaccctttgaagaggaatttaccatctctggcagcttcctaccagacaatggacaagggcaccctatgtgagtttttcagcagaatgcaaatgccaatagaagaaggcttcattgctcagaacctcttctcatagccaaaataacaaaatcctacaaaagagaataaatgattatctaaagaaagctgataaagcattggtgctaagtcatgcctggtttatacaagtatatgtacatatttatgaaaacatatacaaattccttttaaacttgcttattagaatttagatcctgttatgtcatctatgggtcttttttttggggcagaatctccaagatgatctggaaaaacaggaaaggagcttacagaaatttggctctatcaccaaccaattattaaaagagtgtcacccacccgtgacagaaactcttaccaatacactgaaagaagtcaacatgaggtatggagtatgttaactttacacactatttatatcacagccttattataaataatgatataattaaaacaatgacagtttgaatttgagctatatagattctattcctttaaacttctctttcacaacatgaatttaaggataaataaatgtagtgaagagatttagaaagaattagaagtactgtacacccaaagattgccatcatcctcattacctaccctgaaactaggaatatgaaacattaatttttattatgttaactagaaatgattatgtctatattcacatgaaccaggatcatgaaaaataaaatagcacatatccacatttggtgagaggtggtaatctgctcatgagtgttggttattatttccagatggaataacttgctggaagagattgctgagcagctacagtccagcaaggccctacttcagctttggcaaagatacaaggactactccaaacagtgtgcttcgacagttcagcagcaggaggatcgaaccaatgagctgttgaaggcagccacaaacaaggacattgccgatgatgaggttgccacatggattcaagattgcaacgtatgttcaggagctaccttgttttccccacatgcccttcttagactgcccaagtttagcttttggtctgtgtaagctttggtatgtctttctatgtgagacagttacccaaaaataactgtcttaggatcaaagagcctgcctgattttcagaacacaggtgcacatgcatcagactaagaggtctcctcccattgttttattttttaaaatgagttgttttcccatttttcctagtggaatttagtcaatgtgaaagattgaggctctttgtgttttctagggtggtcaatataagacatgaccatatggggaatagtgttctatctttaaaaaatcttctgttccagatgttgtccatttacattcattaactcctatgtaagcatctacacaatagtttcatctaagatattaatggtagaaagaagtctttctctcctaatttactggtatacttcttttaatggctttttaataattctctttttcactgtagctgccaataacctacttaagggtttaaggaacagctcttctcttgtttcaagcattacatggctcttactatttgtccttatttgtctttatttttaagagcttgttacgaggatctttttataaacttttccaaatcagtttattagaattaggcaagctataaaaactatgtaaataaaagtttaacctattctaatatcttcaacctgaataatcactttaaagctaaagatgggtattttaaaataaagataatacagtgcttttttcatccacataatttgtgtgtacaagaactgtcattttcaatactcctgaattgaaatacaccttgtctgttatctgtgtcaagcgtaaagagccctttgttcttctttctctcacagaagtcactgcctaggcataacatgactgagtgggataccagcaacaggtagaagaagcagtcacttattatctctcaatgataggatagaaagcagaaacagggagtttccattggcttatattttttaacctgtaggagggtcccacagaaagtggaggcaaagagatcccatggaaaagaatgggaatacaggctactctcaccccctgctcaccaaaatcatcactgtgttctgtaccctactgagataggaggttgctgtacttgcaataatgtgaccacacatatagaagacaccacggacaaattcctggtgtgtatgataataatagaaaaaggaaaaatataacattttgttttcaatttgatacaaattacataaagaggcaggaaaaaaactgccaaaatatttccagttattggctctactcttgggtcatgtttgtttttttttttttttcttgtttatgtatgtttttctgcatttccccaaggtcctgtaatgaacctacatagcttttactaacaaaagagtaattatatatagccataggttatatgtgtataatgtatgtttaaaatattaacatagcattttaaaaaatggggttcagtgcgtgttcatttttccacaggtgaagtttatttagcctaataatatgatccgtaggaatggtgtgtttctacatgtgtagccctttgccgattgctgtttatgataaggagtatcaacatgcttcagagtgggcatattttcacctcttctaggacctcctcaaaggactgggcacagttaaagattccctctttgttctccatgagctgggagagcaactgaagcaacaagtggatgcttccgcagcatcagctattcaatcggatcaactctctttgagtcaacacttgtgtgccctggagcaagctctctgcaaacagcagacttcattacaggtacagagctcctatttagtatcttctgtatattggctgttctctaatatctgggcacaaacacagaaaaagaattccttgtcatggcaacaatgcctccttcaagactcaagaaaatagcaagtaaacaaacttggaagttctggtggggacgatgaaggtggacgttttgcgctgttctctgccaaggaattttaaaatcggtttaagatgcaagcccctgaaccaatgcctgccaccatggcctgttcaattaataaacactaagcggctttaatatgaatattcgtgtttatttaactcagacttttacaagaatcagaagatttttcagacgtgttgtttgatcatgtatttaaagaataatttgaattgttattgacttatggtgcatagaaataattatagtttttagaaaaattacataaagaagatttaaattgttatagctttttttataggaacgtctagagaatggcaatttgatacaagaatatgaaaaataattttaatatccacttgcccttttaccagactttattaaaataccaatttttttttttttaactgaaataccaatttcttttgtggaaaaaaaggctggagttcttgattatgaaacctttgccaagagtttagaagctttggaggcctggatagtggaagctgaagaaatactacaagggcaggaccctagccactcatctgacctctccacaatccaggaaaggatggaagaacttaaggtaagtgtgttcaaatctgagtcccagatcttttaccatctgtcttcaaaaatctttttttttttgagatggagtctcactctgtcgcccaagctggagtgccgtggtgtgatctcggctcactgcaacctctgctttccgggttcaagcgattctgcctcatcctcccgagtagctaggattataggggcacgccaccactcctggctagtttttgtatttttagtagagacgaggtttcactggtcttgaactgatcacccgaggtcaggcctcccaaaatgctggaattacaggaatgagcaaccacacccagccctgttttcaaaatcttaagtgaaactcaaagctgatgtagacccactctttctttcgagtgagcccccagtgagactttctctggcaaacagtagactgtgtgctggcagtgggcacaggctgatttcccagctcactcctggaagccacctcactcctccctctttccaccgctggaaaccacctcactcctcctttccacggctggtccctctccatgttcctgtacccagtccatcacctctctattaacttttgaacctctcgtctctgtttctaacatcatctactcctagctcaatctactcctatctctctgagaccctacagccgcctcccacagatctgcatccattcacccaacctcccctcctcctggctgtcagaatgaccttttttgttctttttaagggttttacttaattagcttgatttaatcattccacattgtgtgaaaacatcatatcatactccataaatatatacgattataatttgtccatcaaaaataatttaataatttttttttctttttttttttttgtgacggagtcttgctttgtcgcccaggctggagtgcagtggtgcaatctcggctcactgcaagctctccctcccaggttcacgccattctcttgcctcagcctcccgagtagttaggactgcaggtactgtccaccacgcctggctaattttttttgtatttttagtagagacggggtttcatcatgttagccaggatggtctcaatctcctgaccttgtgatctgcccgcctcagcctcccaaagtgctgggattacaggcctaatgtaatacttttttaaaaaaaaaaaaaaaaaaaggttttacttagttgtgaattttttttttttttgagatagagtcttgctctattgcgcaggctggagtgcagtggcgcgatctcggctcactgcaacccctgcctcccagtttcaagcaattctcctgcctcagcctcccaaatagctgggactacaggcatgtgccaccatgccctgctaatttttgtatttttagtagagatggagaggggggtggttcactatgttggccaggctggtctcgaactcctgaccttgtgatccgccctccttggcctcccaaagcactgggattacaggcatgagccactgtgccctgccaattgtgaatgattttaaatattcaatcaagtaagcaaaataattcaacaggcatgaaaattttattgtattattcccttggttaaagctctcaaggtttcccactgctcttagggaaaagaccatgtggcttctcaaggcggcatcctggttccacctttcctgaggatcttattctgttgcaccatagccactctctccctccagccactcccgtgccactgtgcccgtgatatttcctctctctggatttgttttcttgtcctcgtcagctcactcctcactaaaaagagtaaagtcctggtcattttgttcaatgtcactctcttaggaaagtctccactgtctgtccaggaccaggccccccagtgacacattttcatagcacactattgtttttcttccatgctctatcatgtcatttaattacattcctgtgagtaggggactactgttgcacttttgactactagaatagtatcttattccctgtaagtgccacgaggggaaggactgtgtcatggctattttgttcattgctgatgtctacccatggacattatgccatttaacagttatattttggtttcaatatttgagatttattctttcttcaaaaaacatgagtcttttgcagaacatgcaaagagaagacacacacatagccaaaggtggcctgacattttttctttcctgtaaccaatttcctagatggagataaggatacccatgggaaaatcagaaccgacaacattgtcctgtgtttgaagggagggaagagatccaaaagaatagattgctcttttgattgagtctcaccagctgtggggtggcgggtcagagacctaaaactggagctcttaaaatgtgtggtcacttcatagctcaagtgaaatcttattttctctagcaagaacccaaggaggttcgtttaccctcttccatttactagctggctggcctggagcaatttacttagtttctgtgcctccctttcctcccttgtaaagagagaatagcagcatgacttatcttatgtgatcgttttgaggataaaatgagttcttacttgtaaagctcttgtcagtgcttgattcatagtaagtgctcaataaacgttagctatcactgttataacttttgttagttgtgaataataaaggaggaaattagcatgaacaaattaaacgtaaatggtaagaagtaaggtcttttacttatcagcataattttcatccttaatcagttctgtcaagaattgcctatgagtaaataaatcaagtaaataatataatacttgtaatataattacatatgagtaaatcaagtaaatagtatatgtaatataatacacgtaataaaaatcaagtaaataatataatacgtgtaaataaagtaaataatatatttgtatgtataaaccatacaagtaaataatatatcaagtaaataacagaatacacgttaagtagtccataaaggataatgagtagcttgagtagcaatagcagcagcagcagcagtttagactgaaaagtagatttggcttttcgctattcgtacctagagattgtaagtaagtggcctagaaatgcagaggccactagaccgaagaccagctacttcctgaaatcagaaattcactgcgcactttgaaaaagttttgacttttttgaccatggtgctaaacctacttttaaatcttccttctagggacagatgttaaaattcagcagcatggctccagatttagaccgtctaaatgagcttggatataggttacccttgaatgataaggaaatcaaaagaatgcagaatctgaaccgccattggtctctgatctcctctcagactacagaaagattcaggtagagtaaacaagagatgtcttggttgctccagttgtcttagtctggtttgtgccgctatgtcaaaatactacagaatgcataatttataaagaacagaaatgttgaacagtctcacagttctggagactgggaagtccgcagtcaaggtgctagcagattcagttgtctggtgagggctgctctctgctttcaagagggcaggttttgctgcatcctcaggaggggagagttgctgtgtcctcacacagtggaaggcagaaggacaacagtgctgaacgctgtgtgaatcttcttttaaaagacccttaatcccattgacaaaggaggagtcctcatggcctaatcaccgtgtaaaggctctgcctcagaatactaccaacattcaccacgaagtttcatcacctgaattatggaagggatacattcacaccatagcaccaatgtatcaatagaatataagctcatgacttgtgtatgtttataaattctgatctttcccataacactgacaaaatttgaactaaaagtgggaaattcaaattgtaaagtcgtttctcatgtttagtgtactaaatagcactttaatcagaaaactcttttaagtgagaatatattaaaagtatatacataatttttatcattttaaaagaggtacattttaaacttctacattttttcaactttctttcttctttttttttttttttttgagacggagtttcattcttgtcacccaggctggagtgcaaaggcacaatctcggctcactgcaatgttgggttcaagcaattctcctgtctcagcatcccaagtagctgggattacagtcacacaccaccacacccggctaatttttgtatttttagtagagatggggtttcaccatgttgaccaggctggtctacaactcctgacctcaggtgatctgtccacctcagtctcccaaagtgttgggattacaggcgtgagccactgcaactggcctctttcttcttttttaaaataattttaccacctgacatgaaagctttgtggtggttcaattagaattgagcacagagattatttaatctagttttatatgctagagatgtaagaataagcagtgaaataaccattgttccttgccctttgttctttcagcaagttgcagtcatttttgctacaacatcagactttcttggaaaaatgtgaaacatggatggaattcctagttcagacagaacaaaagttagcagtagagatttcaggaaattatcagcaccttttggaacagcagagagcacacgaggtaagttgtatcagtagatttgggggtaataagaaatttttaggcccttagaagatgctacgaaatgctgtgtgggagaattaaaatcatgccctttgcacgagtgtctaaatgcatgcatcattttgccttctttcttaagcttgaggttttgataacttaattataaaaatgtagtcctattcgctgctccatgattgtttataagcacgtgtcaatcttcagttccttgtaaagtataatgccagaattgtggttaaaggctacttactcgagacaggcaaagttggtggaacgtgtatagatagttagacaattttcaaactgggttagagactactttaatatgccaaggacaattgcttaagagactatgctttgatcaaaagtctttaaaaattttgtgatcttcaaagagcgtatatgaattttataccaggaaatcaatctatcaaatgtctccaggtgtacctcttgattaaattgcattataattatttcttaagaaacaaagagggagaagaactatatacacaaagtaaattaataaatttgcccactgttaatccttatgttgctatttaccggtataactaagtcagtttgtgtatttatgaatgatatgcacatggagagataggtcttacctaagagaaaagaaaaacttaattcagaattttttaaatagaaaatttaaagatatctaaggtatttttaaatccagttttgttgaattgacagatgatgaaataatagaaaaaagactacaatgagattgcatctcacacccacaaggatgactataatgaaaaaataacaaattttggtgagggtgtaaaggaattggaaccctaatacattgctgatgggaatgtaaaatggtgaagctgctttggaaaacagttaacatagagttaccatatagagttacgtagagtaatcatataacccagaaattccactcctaggtatatactcaggataaatgaaaatatgtgtccacacaaaaacttgtgtaagtacattatttataggagcattagtcataatagccaaaaggtggagacaacccaaatgtccatcaactgataaatggataaataaaatgtgaaatgtctatataatagaatactatttgcaataaaaaggaataaggtactgatatatgttgcaacatgtatgaaccttggaaacattatgccaagggaaagaaaccagtcacaaaagactacatatcgcaagattccatttacaagaaatgtccagagtaagtaattcatagagacataaaatagatgagtggttgctgaaggctggaggattgggaagaaatggggaatgattgctaatgaggatggactttctttttggggcaatgaaaattctaaaattgattgtggtaatgattgtaaagtctgtaaatataataaacaccactaaattgaacattttaaatgagtgaattgtatggtatgtgaattgttactcaataaagttgtttaaaaaacagtagaaataattcgaaggaccttctcttgagttttttaaaatagtgaaataaatttattaaaatttattaattttaaaatttaaaacttaaaaacagtgagttttaaaagacagaaaaagactaggctattttttttctttgacttctttaacggtcctaagctattctctaagttttgaatatggaccatattttatatacaaaataaaccagaaaacaaattgtgcattaacttactttattaggtgtttttgaaagaaagaagagaaatataattctacttttggtcatctagttttagtaaaccaaacactaaactttatctttgagtgtatcttaattgatgatttaaaaataaatgattcctaaactgcaggatttcacacattttctggttcagctggtgatagctttcatagtcttgcgaaaactagaatatttggaaagttatcagagaaccgatcactaaaattaggaactctaaagtatgttcttcttttttttaaattatagttgtttcaagccgagatgttcagtcgtcagcagattttgcactcaatcattattgatgggcaacgtcttctagaacaaggtcaagttgatgacaggtaggatctttgataaattattacaaagaaaggttccagtaaattagtcattttctttttaatgagcagattggagggcatatatccaatcttcctgaggcaattgaactgtagtggggcctcagtaattggaggagaaacttgtctcaatctctgaaatgaatgagtattgaatcttttttggagagctgctattatattatatgaagggcatagagtaattggaaatcacctagccaaccttcactagtcatctgtaggaaatggaattaatgaatagatcagcatgaaccatatcaatgacctatcaacggtttgtaaacagatgcttctaatattcttatataattacagaaatttttttgtaaaaggagcatagagatcactagcccatctctcttacttacagatgaaaaacccaaaatccacaaatgtgaactgatttgaccagggtcacagaactaagtagcagcagaatcaggcctggagctcatgtctggttttcagtcagtactggatcataccagccagctttctcatgccatgagaattctgtgtttgaaaatggtttgctaccttaagtcagattacatgccgcctgaaatcttttcttccttttcatttacaatagcaaattatctctttattaaaaatggagaggtaaaaatttagcttctccccagatttatggtatgagaaatgacaatttcatactatatttacatttcctaggaacaatatttactttatctaatcgactttccgtggtgatatttggagtattagcctcatgtgttctattacatatgtatacctttctcatatttaggaaccagtagttgtgactaaaattaatttgatattttttcaaaaaataaaaaataaattatttttattgagagttttgtctttaatgttgtagaagcaatttcagttttaagtggctatttctttggaagtacataaaagatcttcatggttaagcttggaacaacagaatgtgatattatatttattctactctaagtaagccaaacttaaatgggagctttcctgagaatttaaggccttgaaaataaaacaaattcaaatacaattaacttttatcttttgctttatcatttcttagccaactctataacaatattataaatgtttgagtcattaagtaaaataaaaattaaatactcacatgcaagccagcatctattaacttttcaatactaacatttagggaaaatacaccaaagagatgaaaatgggaggttagacttgagggtaaagaattttgaaagttgaagggaaaaaaaaatcagattagagcctactgacaataagaaggcctcagattgcaagtgtattttgttctgaaagttaatttatgagttacgttttttagagcttcaagttcagcacagggaacagtgtcatgttttaagtaattcctcatgctggcaggtagtttgggacagcttggttgtatcaagagagggtggggaatcctaagaggccttggatggttacctggtagggaaagcaagattatacgatattctcaagtcctggagttgtacattttctgcgatgacagatgcttgtaacttttagggaagtatcatgaacctaattcatcacacttgaatgctagtacattgattaatacagcaaaatttcctttcaaaaacagaagtcatcatcaaaatctaagtagctatcacatggattttttttttttttcttttttgagacagcgtcttgctctttcgctcaggctagagtgaagtggcgctatctcggctcactgcaacctccaccttctgggttcaagtgattctcctgtctcagcctcccaagtagctgggaatacaggcacgcaccaccacgcccggctaatttttgtatttgtaatagagatgggatttcgccatgttggccaggctggtctcaaactcctgacctcaggtgatccacccacctcggcctcccaaggtgctgggattaaagacgtgagtcaccgggcccggcccattatggatctatttttaagatgagagggcatacgaaattttttgcagaggctttacttagtacattttatttttaatacttgttttgttgacgttgtctgggtgttattcaccttttgtttaagttgagtcattaaataagtttctaggactaacagcatatttggttacaaaatcaaagtttatagtggttctggataataggaagtttcaagaagatacaagttcacaatagcaagtccaattcaaagttgatgctaccctcaagagaagaggatagtatatctgaggaagaaaagcaaaactattgtaatagagaagtgcaagtgtttagtattaaagtgcaacattacttgcactttaggtgtgaataacactgtaatctacatagaaactcattctgtttcatgcgggacagactcttactagccagttctagagccataaattaaatattaaataaaacgtaataaagaactacctatatttttttaaagccagaaaacagagaggtaagaacacattagaagacctgatatactttagcctgaacttgagaaatcttaagtaaaatttattatttctaaatatattaatgacatttatacagactatgataacaagttttcatctttctaagaataaagtgaagtcagcctacaatgtagaagagataattcagatgaacatctggaatgatttgctaaaggttggggctgtttattgtgagggaatactgagagagtttatggagtacagtttttaaaaaatctttttaaattacataatttgattcaagtggcttatgattcgaactgaagacagaggttctacataagccttgttccacacattttcctgcagtgtgtcccacaagatgatatcatcatcacgagctgcacatgttgctatggagctgcttaggatttgcagctattcccgttgcacctgcagctgtccactcctcccctctcatgctctcagggagacagtgaaggacaatgaccttattgtatatttgccttcaacctatgctgagacatgaaaacactcaccatttgcaaacactggtggtttaattttaaaaattaattgcaatagacccaaaacccagtaagagatcatggcatgatattcaaaaaccaccgccctagatcacttctcagggcttagggttgttgacagtgtatacattggctgattgcgtaactgcatccaagataacagtgcttttttaccatgtaattatttcttcactagggatgaattcaacctgaaattgacactcctcagtaatcaatggcagggagtgattcgcagggcccagcagaggcgggggatcattgacagccagattcgccagtggcagcgctatagggagatggcagaaaagcttcgtaaatggttggttgaagtgtcctacctccccatgagtggtctcggaagtgttcctataccactgcaacaagcaaggaccctctttgatgaagtgcaggtaagatgcaaaacacagtgttctcacacctcttaggcatttccaccgcacactttaccttcgcctcggtttttcaaaaggactctagagtgacattgcagctgggacaaacattgttctcaaatgtcaacagaaatatacaaaatgattgcaatacaaagcccatatctaatggtgaaatgatagtaagccccagcctctcacaaaggctgcttacacttcacacactatggcctgccgcagctcactaaatcccagcagggatgaaaaggtaatggcaagggaagaaaaacttcatgttgcttgcatacattttattcttgagcaatttaaacacgtaacttgagtattccaaagaagacaggaagccctgtcctgtttgagttctttgttcatttccaggttgccccttaccttcaggcttctagcatcttagagagatatctcctatcactctagtgagttctccccagtgtatccaatgagttcctcttcccttaaagtcactgttctttcgttcgtttctcctccaaatttctctgagagccctcattcgcagacatgacttcaactgccccctgccagcagagaaggggcatattcatatcttctggtcatatttacctgctgtgcttttgacttgtgtttctaaccaccttgtgagtttatgtctatgtgcatcacagatgccttgtaccctgtgggtcccagcagaacctgtggtctctggaccaacttttctccctttcccatcacacttccaggaagtgccattagtctaggaatcctagaataatttgagagctatacttctccttgtctatcatccccttatctaatctccctaactctacatccctgctgccactgccttggttaggtgctcgcgatttcttgcccagatagacaatagcttcctaatcttagtatatccaacacacatccttcttccattctacttttactcgattcctgagtgcttttatgaaaactttaatcccaacatcaatattcttctgtgaaccccagtcacttttagtataaaaaccaaatttctgcaagatgtcgtctggcctcatctcctaccactctctcacatgccatccacactccagccactgaaaaccatacttagtttcctgaatttatcatatttttctcatatagtgaatgtgcgcatcctcatttctctgtgagaaggtggcctctcctccactcctgatcacactcatctcaccgcaccaggtccttcttaatctggtgaagttcatgtctcgcaagacacattcagcctttactgctttgaggaagcctctctgcctcttggtgcgccccctgctgggtcagatgtccctctgtatttccacgcatcaatcttaaagagtggttatcttattacatcaatcgtacttaccttggagacagaaactaagcctgtctccattgtattctcactcatttattcactggtgcatgcatgtgcaaagcaccactacggtaaatgcttgctggatgaaagagggcaaaagttagggccatttaaaaatccttatgggaaggaaacgatgaaagaaagaatgagaaaataaaaagctatggttcctttcagttcaaagaaaaagtgtttctgcggcaacaaggcagctacatcctgactgtggaggctggcaagcaactccttctctcggcggacagtggcgctgaggccgccttgcaggccgaactcgctgaaatccaagagaaatggaaatcagccagcatgcggctggaagaacagaagaaaaaactagccttcttgttgaaagtaagttcagttagaaaaaaacgaaccaaaaaacccttttagtcgttgtactacttcctcccattgttattctacaaatcaaataatgcaaagatcatgaaataataccctgcagtattttgattctctgtgttttatttaagactttgtcttatcttgcacaaactggaaaagtttcccaattttcagcatttaatttttcaggacaacctcccaacaaagtaaagtctaataagactgtctaagctatgaattctgattaatgaccagtatgaaaccttagccatgtgatgactttataaatccacacagaaattcaaagggtaggttccactccctaatctgagactctaaagtggttttcaagattggtatctcttcttttatggaagggaaaaaccaatccagaaagatactcttaatttatcttagctgatccaagcaagttgccatgagataaaatctccaggaggtgtattaagcccttagttggatacagatcacatactgatcacacagtaagttttggaaaatgtagatttatccggacctcccacaatatgcttttctctctcactcttcaattgcatgtataatgcataattaaatgagcagtttaaaaaggacaggacctctaaaataagataatctcaagttaaaatcatggtaaaccaagtgacccagttaacttagcctatctaagcctcagtttcctcatcggtagagtgggtatataatttcaccacctccatgtggccattgtgaggacttaatgaaataatgatagtgaatcatgtggtaccttacctggctcatactgagcgctaaatgaatgatagtgattatcatagttgatgttattacaatctttaaaagtaaagacacctaaatgttatggtcctgtatatgttgataatcaccaacacttcagtgagggtatctattaaatttggcctgtcacatgtttggatcaaaggtaatgactaaggttaatagaaaagattttgctttttttttttaatgcttaaagtgtgcatacatacccattggatttattctattgaattttatttaataatatattgccttctgtgtagtaagcaatccatcaaaaatgccactggacatctataaaaaactattatttgcacacagcacagtttcatcagtaatgtaatatgccaggttcattttcttccttttgcttttaggaaaggatttaaaacattgtaactcatcctgtagagaacatgttaatcatatatttttttaaatttgtgatgtgatttttggagatgtttccaagacttaataaggcatgatgtctgagtcactacatttgcttttcttgtctgtctgtttgttggtgtagaaaacatccactttaatagatatttgcaggctcatgacattaagttatttccttataattcacgtcataaaaggacttggttatagatttagaatctaagtcatccttggaaagaggaatccctcttctgttcttgttaaagtttattttattttgacttttacactacatccgtttgcctaagaaggaatttatgaatctgaattttgatgtttatatagcctcattttagtctattttttaccccagctataatacttatctatatttagcttttaatactgttagtaagtatgccaaatataggcattataattccatgctctgtatgttcaccttcttcactatcatctcttaattttgttctgaaaagtaagaagctgatcttttttatctttctttcttgtttttttttcttttttttttttttgacatagagtctccctgtgtcacccaggctggagtgctgtggtgcagtcttggctaattgcaacctccactcttctgggttcaagtgattctcgtgcatcagcctctcaagtaggtgggattacaggtgcacgccaccacgcctggctaatttttgtatttttagtagagatgggttttcaccatgttggccaggctggtctcgaactcctggcttcaagtgatctgcccttccttggcctcccaaagtgctaggattataggtgtgggtcacagcacccgtgatgatcttatctcttttagatcaataaatttttatcaactgtatgttgatcaattcaggatgtttgatagttttattgagaatgttgtttaatttaagcagaaagagaaactttttgtctaccctcactatggttagcattgataagctaattgtagccctgggaacacaaagcataaaacaaaggagaatttgaacaactctgtccctgatagacaatttttttttgttttttaagaatttttttttctggtaattgggaagagggaatgtggttatgcactctaagaagttctatgaaggaattttaaagagaaatgagacttgtgccaaattctcagttcagtttttgaataaagacattttgagtaagggggcactttagtcaacactgcttccagaaaatagttgtggtaataacacctctgggttgttatgctcaaactaaggtgtcaggagagaagtagaaataatccagataagaaaagactgatgataatggaagagatattgtgaaggaagatggaacatgatttgacaccatattgacaactaaaagtgattctagtcatgattctagttgtcttgctttggaattctgtaattcacggtgtatggagtggccactggggagatgagtggggagcaggaaggcctggattggagagtttgacaaacgggcagtgttggacaacatgaaggagacttgtttagttgaaattaattttcactggcactaagacaccggataggagttaatgtgtagataaggtgctataaaaaagatcaagctctgctgtggttcctgtcattttttaaaattctacttttttattacaaaaaaattacgtgtgtctgatttttaaaaattaggtaataatttaactatacagagtaaaaaatgaaatttcccttattgtgccatccaaattctcctatattctcaagaggtaaccattgttaccagtttgctgtgtaacctttcaaaacataaccacacaatagatgttttattttgtcagtacatagagctctacctcattctatactgcctatctctaccacctgccctggcctattcctctccagagcacttactgctactttgcatattagatatagatttcttaaattgtgcattatctctcttcttctacatcttaatttacatgggtttttatatattacacatttaatcctttgctacatatgtttcagcatgaacaagataaagccagtcaaaaatgccatgcttttgtagtgcatatttctctttctgtaagacatgccatatcctcttttttttttaaatcccttatagtacatttgggaaagggtagacattgggtgtagttatggatggggttaagaaagagacaaggtactgagattatagtcctacctctgcagatagatgtggattcagataacattcttggatacccataatattctggtcattgtgcttgatgccttgacactcattgcttcctttgggctccaataaatatggagagtttgtattttttccattttcgtagggaaaatggaaacatagagcattatctgcttaaagccacacagatagtcagtaacagagtcagttttgaactcagctcttctgatgacaacagcatgttgcctcccctggcaatgagtgtgggcataacttcatattgttcatcagcgcaactttgttctttttttttttgcttttttttttttttttttttttttgagacagagtctcgctcttttgcctagactggagtgcagtggtgtgatctcagctcactgcaacttctgcctcctgggttcaagcaattctcctgcctcagccttctgagtagctgggattataggagcctgccaccatgcctggctaatttttgtgtttttagtagagacaaggtttcaccatgttggccagactggttacaaactcctgacctcgagtgatccacccgcctcggcctcccaaagtgctgggattacacgcgtgagccaccacactcagccatcagtgtaactttcattctttctctgggaatgaagaagagtgtttcttttcttttccccccccagtttcctacatcaaaaacatctatgctatttgtttttattcccatgataggactgggaaaaatgtgagaaaggaatagcagattccctggagaaactacgaactttcaaaaagaagctttcgcagtctctcccggatcaccatgaagagctccatgcagaacaaatgcgttgcaaggtaaattactgaactgagattttcaccgtcacctgtgtgcctctgctggaatgtctttggggccataatccagtcaaactcttaggttatctacatgcagatacaagatcctagtatatgacataaggacaggcaactcaggtgaaacttgtatggctgatttattgcagttgatgaaattatagactagtttatggattactccaaggaagcaaatgaaaatttaaaacacattaaaagatatttaaaagctgagtcaagagcaataaagtcattttttttgaagcatccacactggggagtcattctaccagaagaatcgagtctacaagaaggaaaaaaaaaaaaaaggatcaacagcctggaaaatctgcagacagtggccctccaaagaacacaccctgccctctagaccattatgcaaggaaagggggaaaaatagcttatctcagtgactgcatagagacacacaatccctaaattgctcagggctctaagtacttaaagattatgatcaacacttcaaatggtacttggaagcaagtcagtagctaatacagatcactccctggattatgagctcacggagaccaacacaattcagtggctataagattcatgcctttcacatctttgtagccaagtgaaatgtccaaacagcagttctttgctgagcaataggctgatcatatcaaacgtacctttaaaaatgtttttctttcaaattaaacatgcccttgtgttccccagtcatttgcaaattattgctctagggtaattctgttaaaaattcgcatatacttaaatgacttgggttttaattagaaattctctgcctcagtttggcaaagaaatcctaagcatttaagagatgataattgttaaagaggtctagaaatcatgaaaagtgtggctataagaattttttcttcagttgtaaaatctaaggatattatttgaaacttgaaaaaggcagatttaggaaagttaaaaggtagtatattttacatcatggatggaaagtgaaagaagtactatcttgagctgttacattcagaagtatgcaatggttacaaagattaaaaagcgcattttgaacctgtgatgataaatttattaaaaataaagaagccgggtgtggtggatcatgcctgtaatcccagcactttggaggccaaggcaaacagatcatttgagaccagatgttcaagatcagcctgggcaatatggcaagactccatatccaaagaaatttaaaaattaaccagagtggtggtgcttgcctgtagtcctagctactggggaggctgaggcaggaggatcacttaggaatctgaggctgcagtgagctatgatcacaccactgcatccagcctggctgacagagtgagaccctgtctgtaaaaaaataaatacattaaaaattattaaagaaaacttctgcaaagcaggaatgggcatttattaggggctgtgactatattggtgttatctcagttggcattaacaaaagctcgtgaaaacatttattattgccccttttcagaagggaaaactgaggcctctggaaatttaataacttttcaaagtcagtaaatatctgggttgcctgtatctacaggctatatttttgccacactgactcgtttaaggggttggtatactgtgcgtctgaaacagttggtttttggtggtggtgttattatgtacttttgttaaatccatatacaaatctgatgctcgagttgggggggtagaaatcggtgtgaaaagtggaaaatctttccagtggtataacaattgaatatgtttagaagtattagaagaaatgttgcatatttaattaacctagatggtttggtctttcagccaaatactgttgccatggggcgtcattttttatctcccaaaaaacatgacagttacaaacacacgctgctattgagtgtgtagatttaaaaaatgtattttcgtctagtcctgctactcttccccaaactgcccttagcagcaaaacaaggcaattacctggaaaattcaggctaaaatcttgtttgcctaaattgcttgggaagttagcctcagacagcaccgctaattgccattgcctttggaaacctttctaccgtgtaaagacacataaagggaggggaaacggcacatgaaatactctatttatacacaaaactagctggaatctaaaaacaacagctggttatacaaattgcaaaactggtaattggtcaaaatattgtaaaaactaatgtcaactcattcaaatattgctatatgaatttttttttcttaaatcattcccctaaaagacagggtacataatcttttttagtaacttaaagaaatgtctgatcctgcagaaaatgtattcagtgcattgttttaaattgagtagtaacagcaacagatcttctcagctattacattataagtatagatcacagaatgtagcaactctatagtgcttgaaaatgaaagttaaatttaggtgtctgtttttaaaaatatttcatcagtgtgatcagcaattcaggacaaaaagaaaggataagttagaggtttatgaagtcagtctaaagtaaagaagatcaatacagtgattaaacttcaatttaggaaaaaaaaattttaaatcaataaaatgatgagtagatggcagaaagattctgcaggcaatcatactttatcagaaggacttagcaatttatcaaattatgtggaagcaaatgaaatatgggcaaacctcattttattgcacttgttttagtgtgtttcacagatactatgttttgttttttgttttttggttttttttttttttttacaaattgaagattgtggcattgctgcatagaacaagtctaccagcaccatttttccaacagcatgtgctcactttatatgtctgcataattttggtaattctcacaatattccaaactttttctttactgttatatttgttacagtgatctacagtcagtgtgacctttgatggtgctattgtaattagtggcaccacacactgtgcccatagaagtcagcaatcttaattcataaatgtagcatgtgttctgattgctccaccaacaatgttcccaatctctctccttctcctctggcctccttatttgctgagacacaacaatattgaaattaggccaattcatacagtggcctctaagtgttcaattgaaaaaaatctcatgtctctcactttaaatcaaaagctagaaatgattaagcttagtgaggaagacatgtcaaaagctggaacaggccaaaagctaggcctcttgtgccacaaacagccaggttgtgaatgcaaaggaaaagttctgaaaggaaattaaaagtaatactccagtgaatgcatggatgagaagaaagcaaaacatccttattgctgatacagagaaactttgagtggtctgaataaaagatccaaccagccacaacattcctttaagccaaagcctaatctggagcaaggtcgtaactccctttaattctgtgaaggctgagggaggagaagtaactgcagaagaaaagatggaagcaggcagaggttggttcatgagttttaaggaaacaaaccatctccataacataaaagtgcaaggtgaagcagcaagtgttgaagtagaagctgcagtaagttatgcagaagatctagctaagatcattgatggaagtggttaccctccctccctcccttccttcctctttccttccttccctctttctttccgtctttccttttatccttccttccttctcccctcccctcccctcctctccccttcctgacagagttttgctcttgttgcccaggctagaggtagatcaaacagccctatgttggaagaagatgccattgagaaatttaatagcttaaaagaagtcaatgcctggctcgaaagcttcagagaaaaggctaactctcttgttaggggcaaatggagctggtgacttaaagtcagtgttcatttaacattctggaaatcctaaggcctttaagaattatgctaactctacctgtgctctataaatagaacaacaaaacccagatggcaccatatctgtttacagtacagttttactgatattttaagcccacttttgagacccactgctcagaaaaaaaaggctttctttcaaagtattaccacttcttgataatgcacgtagtcaccctagatatctgatggagatggagatgtacaagactaatgttgtcttcatgccttctagcacaatatctatcctgtagcccatggatcaaggaataatttcaacttccaagtcttattatttaagaaatacactttgtgaggctatagctgccatagatagtgattcctatgatggatctgggcaaagtaaatggaaaaccctgtggaaaggattcgtcattgcagatggcagtaagaacattcccgatttgacctgaggaagcagaacaagatggctgagtagaattctccactgactgttctccctgcaggaacaccaaatgtaacaactatctacataagaaagcgccttcataagaataaaaaatcaggtgagcaatcacattacctgatttcaacttcatagtacagaaagaggcaatgaagagggtaggaaagacaaccttggattgcccacaccacctcttcttttcggtgccccagcagcagccacatggcacggagagagcatctgtgcatatcgaggaaggagagcccagcagttggtctgcattgcattggagctcagtgctgccaataccaggcagaactcagctgatgcccacggagggagcatttacacaagacctagccaaaggggaagctcccatcccagccaacagaatctgagttttgacaagcacttgctaccatgggctaaaatgctctggggtcctacataaatttgaaaggctgtctaggccacaagtactacactcctaggtgggtcctagtgcagtactgggcttggagccagtggacttgggggtacatgacccggtgacacaccaggaagacagctaaaggagttgttgtgccaatcctcccccaaccccaggcaatacagcttgcagctccaaaagacaccccttccttctgcttgagaaaagaggaaagagtaaagaggactttgttttgcaacttggataccaactcaattacagtaagatagggtactgggcacagtcatgaagccttcattccatgccctagtttccagacatttctagacacacccttggccagaagagaacctgctgcattgaagggaaggacctagtcctggtaagacctatcaccggctgactaaagagcccataggccctggatagtcagcagtgtaaccaggtattacacactgtgggccttgggtcagattcggagacatgctggcttcaagtgtgacctagcacattcacagctgcggtggctatgaagagagtcctcttctgcttacaaaaaagagaggcaagaacaaaggggactttgtcttgtaacttaggtaccagcatagcaacaacaggaaagagcaccaaagaggctccaggggtactcaattccaggacttggctctcgggtggcatttctggatctaccttgggccagaggggagcccactcccctgaagggtaagttccaggcctggcagcatttaccacaagctgagttgaagagcccttgggcctaatgtaaacatcagcaatggcctggcagtattccccacggttctgttgtggcagtggacctggggagcgactcctcagcctgggacagggaagggaagagtggaaaggactttttcttatggtttcggtaccagcttatctgcagtagaacagagcaccaggtagatttctaaggtttccaactccaagccctggcatctctcgaccacctggggccagggggagctcattgccctgaagagaagaacacaagcctgtatggcctagggccttgaccaaacatagagagtagccaagtagtggttacagtgggccttgggagagagccagtgctgtgctggcttcaggcctaacccagtacagttccagtagtggtgggggatccacaggggtacttgtaactctcctctccaccagtaccagggaactcagcacagagaaagagacgctgtttgtttgggagaaaataaggaaagagaacaagaatctctgcctggtaatccagataattcttccagatcttatccaagaccaccaaggtggttcctctatcagtctgcaagaaccacagttttagtgggcttggggtgccccctgatgcagatttgactgcagtgactaaaaacttaggtcacaactcccaggtcccttcaaatacctggagaaccttcctaagaagggtaaatacaaacaagtcccgactacaactacaataaatacctaattcttcaatacgaagacaccagcaaacatctgcaagcatcaagaccattcaggaaaacatgacctaacccaaaaaataccaataaataagacaccagggaccaattctggagagacagatatatgcaacctttcagacagataattcaaaatagctcttttgagctgggtgcagtggctcacacctgtaatcccagaattctgggaggctgaggtgggtggatcacctgaggtcaggagtttgagaccagcctggccaacatggagaaaccctgtctctactaaaaatacaaaaatcagccaggcatggtggcacatgtgtgtaatccaagctgctcaggaggctgaggcctgagaatcgcttgaacccaagaggtggaggttgcagtgagctaagattgcaccactgcactccagcctgggtgacagagcaagactctgtctcaaaaaaataaaaaataaaaaaataaatgtaagaaaacacagaatgaattcagaatcatatcagataaattaaagaaattgaaataactaaaaggaatcaatcagacattctgaagttgaaaaatgtaattgacatactgaagaatgcatcagagtctcttaatagcagaattgatcaagcagaggaaagaattcgtgagcttgaagtaagctacgcagtcagaggagacaaatgaagaggaataaaaatcaatgaaacatgcctacaggatccagaaaatagcctcaagagggcaaatctaagacttattggccttcaaaaggaggtagaaagagagatgggagtagaaagtttattcaaagggataacagagaacttgccaaacatagagaaagatatcaatatccaagtacaagaaggttatagaacaccaagtagatttaacccaaagaagattacctcaaggcatttaataattaaactcccgaaggtcaaaaataaagaaaggatcctaaaagcagcaagagaaaagaaagaaataacataaaatggagcttcagtacatctggcagcagactcttcagtggaaaccttaccgaacaggagaaagtgaggtgacatttttaaggtgctgaagaaaaaaacctgttaccctagaatagtataaccagtgaaaacgtctttcaatcatgaaggaaaaatagactttttcaaacaaacaaaagctaagggatttcattaacatcagacctgacctacaagaagtactaaagggagttcttcaatctgaaagaaaagaatgttaatgagcaataagaaagcatgtgaaggtgcagaactcactggtaatagtaaatacacagaaaaacatagaatattataacattgcaattgtgttgtataagctataccttttttttttttttcgagacagtcttgctctgctgcccaggctggagtgcagtggcgggatcttggcccactgcaagctctgcctcctgggttcatgccattctcctgcctcagcctcctgagtagctgggactacaggcacccaccaccacgcccggctaattttttgtatttttttagtagagacagggtttcaccgtgttagtcaggatggtttcgatctcctaacctcatgatctgcccaccttggccccctagagtgctgggattacaggcgtgagctaccgcgcctggcctgtataaactataccttaagtagaaagatgaaaagatgagctgatcaaaaataataactacaacttttcaatatatagacaagtatgataagatataaataagaaacaacatggctgggcatggtggctcacacctgtattcccagcactttaggaggccaaggtgggtggatcacttgaggccaggagtttgagaccaacctggtcaacatggcaaaaccctgtctctaacaaaattataaaaattaaccaggtggggtggcgtgtgcctgtagtccctgctactcgggaggctgaagcatgagaattgcttgaatctgggaggcaaagattgcagtgagctgacaaagttaaagtgtagagtttttactagttttctttttgcttgtttgttagtttgctcatttatgcaatcagtattaagttgtcatcagtttaaaataatgtgtattaagatattatttgaaaacatcatggtaacctcaagtctgaaaacattcagtggatacacaaaaaataaaaagcaacaaattaaaacataccaacagtgaaatcaccttcactgaaaagaagacaggaaggaaggaagggggagaagaccatataaacaaccagaaaaaaacaaataataaaatggcagtattaagtccttacttatcaataacaacatttaatataaatgaactaaactcagaagacattgagtgactaaatggattaaaaaacataagacccaatgatctgttgcctacaagaaacacacttcatctgtaaagacacacatacactgaaaataaagggatggaaaacgatattctatgcaaatggaaagcaaaaagggcaggaatagctatacttatatcagacaaaataggtttcaagacaaaaactataaaaagacacaaagaatgtcattatatgatgaaaaaggggttaattcagccagaggatataacagaagttataacatttgtaaatatatatacacccaacactggaccacccagataaatatataatatatatttatatgtttgagaacagcctggtcaacatggcaaaacccagtccctactaaaaatacaaaaaaattagtcggacatggtgatgtgctcctgtagtcccagctacttgagaggctgaggtgggagaatcacttgaacccaggtggtggacgttacagtgagccaagatcacaccactgcactccagcctaggtgacagactgagactctgtctcaaataataataataatatacatttaatttttttccttggttttctgtcacttatgtatgctcatgtatccaggtatataaagcaaatattattggagctaaagagagacattagacccaaatacaataatagctgcagtcttcaacaccccacttttagcattggagagatcatccagacagaaaataaacaaaaaaacactggagttaatctgcactgcagaccaaatggacctaacagatatttacagaacattcatccaacagctacaaaatacacattcttctccccagcatatggatcattctcaaggatagactatatgttaggccacaaaacaagtcttaaaacattcaaacaaaagtgaaattttatcaagtatcttctctgatcataatggaataaaactagaaatcaatagtaaaaagaattttggaaactatacaaacacatagaaattaaactatgtgtttctgaatgaccagtgagtcaatgaagaggttaaaaaggaaatagaaaaatttcttgaaacaaatgataatggaaacacaacataccaaaacctacgtaatacagtgaaagcagtactaagatggaagtttatagatacaagcacctacatcaaaaaagaagaaaaacttcaaataaataacctaacaatgcatcttaaagaattagaaaagcaagagcaaaccaaactcaaagttagtagaagaaataatagagcttaaagcagaaataaatgaaatggaaatgaagaaaacaatacaaaagatcaacaaaatgaaaagtttattttttgaaaagataaattgacaaaccattagccagactaagaaaaaaagagaagatctaaatgaaaaaggagacattacaaccaataccacagaaatttaaaggatctttagcggcttttatgagcaactatatgccaataaattgggaaacctagaagaaatggatgatttcctagagacatacaacctgccaagattgaaccatgaagaaatccaaaagcagaccaatagcaagtaacaagattgaagccataataaaaagtctcccagcaaagaagcccaggacctgatggcttcgctactgaattttaccaaacatttaaagaagaactaataccaatcctactcaatctattctgaaaaatagaggaggagggaatacttccaaactcattctacaaggctactattaccctgctaacaaaaccagacaaagacacatcaaaaaaaaaaaaaaaaggaaaattatagaacaatatctctgatgaacatttatgtaaaaatattcattaaaataatagcaaactgaatttaactgtgcattaaaaagatcattcatcatgaccaagtggaatttatcccagggatgcaatgatggttgaacattctcaaattaatcaatgtgtacatcagatcaacagaatgaaagacaaaagttatatgatcatttctattgatgctgaaaagcatttgataaaattcaacctttcctgataaaaaccctcaaaaaactgagcatagaagaaacatagctcaacataataaaagccatatatggcagatccacaggtagcatcatactgaataaggaaaaactgaaagcctttcctctaagatctggaacacaacaaggatgtccactttcaccactgtcattcaacatgttttcacttatgtgtgggagttaaaaattaaaacagctgaactcatggagatagagagtagaaagatggttaccagagcttgggagggtacatggaggctgcaggggtgatgaggatggttaatggttacaaaaaatagaaaagtatttgatagaacaacaaggcaaatgtagtcagtaagagtttaatcatacatttttaaataaataaaagggtataaatggattgtttgtaacacaaaggataaatgcttcaggtgatgaataccgtatttactttgctatcatctattaaaatatctcatataccccatatatatgtacacctactatgtacccacaaaaattaaaaataaattttattttcacaaaagcaacattcatgattcatgggaggaggtcaaaatgtcaacattaacatgtgtttggaagaagttgattccagctgtcgtggatgactttgagggggttcaagacttcagtggtggagggagtagctccagatgaggtggaaacatcaagaggactagagttagagatggagcctgaagatgtgattgagtttctgcaatctcatgttaaaacttgaatggataaggagttgcttcttatggatcaataaaaaatgtggtttcttctgagaccagacaagattgggcatgtttagggtggtatggccgtcaacaagaaagtggcttcttgaaatggaatctacttctggtaaaaattctgtggatattgttgaagtaacaacaaaggatttcaagtattacataaacttagttgataaagtagcagtagggtttgagaggatgactcaaattttgaaaaaagttctgtgagtacaatgctctcaaacagcatcacatgctacaaggaaacttttgtaaaaggaagagtcatcagtgctgcttaaacttcattgtcttattttaagaaattgccagagccaccctagccttcatcaatcaccactggatcagtcaatggcctttcacgttgagccaagaccttccaccagcaagaagattatgacttgctgaggcctcagatgatcattagcatttttaaacaataaagtatttttaaattaaggtatgtacattggtttttttagacatatgctattgcacattttatacacaatagtatagtgtaaacataacttttatatgcactgagaaaccaaaaaatttgtgactcactttattgtgatatatactttatttcagtggtctggaaccaaatctgtaatattgccatgatgtgcctctagatcccaagttagatatttaaattgagggctatacaaaggaaattctatcaagaggggattcaaaaacacttcagaaatcattggcaggagatgtccgtgggtattcaagtttgtttttttatttaggaattagaaaatgcagttgggagctggacagatgacttgacccagttgagcctgctgaaggacaccctctctgcctatatcagtgctgatgatatctccattcttaatgaacgcgtagagcttctgcaaaggcagtgggaagaactatgccaccaggtaagataagttctaaaaatggaattatcttgatgatggaaaattgggagatgaatttgaacgtcagatgggttaacccacatgtggacccggcccataattcttagtacggacaaaggaagaacactgtggttactaccagaacatttcagatcaatacatttatattttaccacattttagaaaaacctaaactggattctttttctttcacttttgctggctggcattttatatatatatatatatatatatatatatattttttttttttttttttttttttttttttgagacagagtctcactcttttgcccaggctggagtgcagtggcacaatctcggctcactgcaagctccacctcccaggttcacgccattctcctgcctcagcctcccgagtagctgggactacaggcacctgccaccacgcccagctaattttttgtatttttagtagggatggggtttcaccgtgttagccaggatggtctcgatctcctgaccttgtgatttgtccgcctcgccctcccaaagtgttgggattgcaggcgtgagccaccgtgcctggccgctggcataatatttttaagagaaagcacaatgttatggttcacagatgtgattttgctgggtagatatacttgaaacgtgaaaaactactgttgtatttgcaacattagctaatactgtggagctggttttgttcagggaatatttattatcacttttaatttactgtagttgtttcctggtaatttatattcatttatttttagtcatactttattcatttattaaataccttctatgtgcacaacgttttaaaaaaatatcccagattgactttgagttggaaatgaaagggaaagattggtggaaaggcagcgagaagacatcctaggcaaagaggaaaaacagattcaaaggctcataatgaagaacagacccaaatgccttgaggttatgttctccaggaagcagggccctgtctttgttacttctataccccgagtgccctgcctggcacataataggctgtgatacatctctgttaaatggatcagtcatcttaataattgtgatgttaacaaactgtaataaatgtccctatcgtcaagtttaaacttgatctgagactaaaatcagtctaggagaatgtgtacagttaagaagaaaaccaggcataaacaggtaaaaacaatgtataaaactgtctaaaggacccaggtgtggtggcttatgactgtagtcccagcactttgggaggctgaggcgggtggatcacctgaggtcaggagttcaagaccagcctggccaacatggtgaaaccctgtctctactaaaaatacaaaaattagccgcggatggtggcgggtgcctgtaatcccagctacttgggaggctgaggcaggaaaatcacttgaacccaggagccggaggttgcagtgagctgagatcacaccattgcactccagcctgggcaacaagagcgtaactccatctctctctctctctctcacacacacaaactgtataaagatttaagcaagctaaggctagtgtggatggcaaggaataaaggaaatgtttcttgagatggatacattttgaattgagtttcgaaaaggggagtggaggagactgattgatgggaggaagcaaatgaacactctgacaaggtggcagttggagcagaggaactggctggaaaaagctggtgtgggaagactgaggaaggggctgttgagagggggctcttatgtccctactcttatgtccctgccaattgtgctgccctgggatctcttttgtctcccatcctccaccctttctctgactttagagatgcttatcctcatacttcaggaaccattaaacagagtttaagaggctcagagcctcttgattgatgtgatatcaacaagaagtgtattttcaggaaaatttctctctgtatatttaggtgaaaacccatgtttttctcaatccgtgggccaacagaaaactctggagcacacatggtagatgtgtgagcagtttcctatgaatatatactttttaaaacgggggatacatgtatgagatggcttttaccaacatgttaatgatttgagttcaaaatgaatttggctactttcacaaagcttcattttctcagtgaacacaatgaggaatttacatggatttacgcatagagggtagtaatgctaatcacaacacttgattcatttctgaattcttcaaactgaaagcaataccttattatacagtaaatcatcctataattttgcaatgtaaagactttatcatgatgtatcaaaatgaaagatatttggtgggtacaaattgtgggaaattatcacagcaaccttcagttacgtttgtgagcccattcatctgtttttcttaattttaggagaagtctagcactacctgctctcttaatattttttagcatgttcgatgaattgaattagaccagatctattgctttagctaaatgatgcctgtgaagccttcagagagataatattttagagattggatcctgtttgcttcaaacatgccatgaacttccctccccaaagacctggattatgccactcttcctgccgacactgtttcttcccttctaattttcttcttcttcttttttttttttttttttttttttttttttttttttttttttgacacagagctgctctcttgttgcccaggctggagtgcaatggtgtgatctcggctcaccgcagactccacctcctgggtacaagtgattctcttgcctcagcctcccgagtaactgagattacaggcatgtgccaccacgccctgtaaattttgtatttttagtagagacagggtttctccatgttggtcaggctggtctccaactcccgaccccaggtgatctgcccacctcagcctcccaaagtgctgagatgacaggcgtaagccaccgtgcccggtcttcccttctaattttctaacctgttttcttttacattccacaactcctgtgatgtcacttatgaaattctcagccctcagtatgttcttggtcctctgaattcttatttctcttttggttgtgccattatgtggcattgtgttattattcttttcaatgtttgtgacctcattccaagaatatgaggactttgatatgcaaagaccatttctttgcatcttcagtgtctagagtagctaagtgttcatgatgtattgtttataatgaagacattatggcatcgattctatttcctcatacttacgtttctcttagtgtaaaataatgacaagattttgaatattttgaagattaagaagattatggttatgcaatactttttgatttaggaaaagtgttgtataaaaatgccatggaattattgctattattaattgctaaagtagtcattcatatgttgtaaaattgttctccagacttagatatatctagacagccatctgaaaatatatttcaaaagctgatgttgatcatgcgatatgctgtaaatagattaataacttgcacctgtgaggagactaagacgttaaaaagaaacagcaaacggaatacatagtgtttttagaaactttccatgttgaagtgtcttaatgcttgaagctaaagcgtacttacgttattaatacttcagtctgaaaaataatatttaaaccaatgagagtttagtcatgggtttgatcaaggtgccaggatgtaactctaaggaggatatagattagtttctcgttcttgagttagttgtttctggtgaatttctgtcaagtatgaaaccacaaaaggaaatgagcttgtgcccatgtctcattgtaaaagtcaaaacttgagttcaacataacattatccctactaaggagcaagtagtctgttcctattctgaccaaagcagttgatgaggagtctggagtacctgggactggcgatgagaatgcggaatagaggccgtgagtaaacattgcagggcagagttaatatattaaagtatctgttttcaagtagacagcccaaatgttttgttgtgcctgtgtacagccagagcttatacttgtttttattctgttttggtttgtagatttgtgtgtaattctagctgaaatataagtatatgtcatcatcgtaattgctcgttgttttgtcaaaacatcatggtaaaaatatttcaaccagaaaaggatgtatttcctgttgagctgctgcacactctgaaggttttagctggtgcttctcagctgttggcaatgcaatgtatttgtgcccttgcaaaaacataaataggtgctaagctgataaataatttgagggttcatctgaatccaaagaaagagatggtaatgtttacttagtatatagactaaatactagatgtacaaaccagaaggaagatgccattgcccttatcttttgaaaagcgtttggcctgggtttgcacccagtgcttgtagcctcactgtgtcttttttaaggtgtagctccgtggtaagaaaatgaaagcaacattttcatggtgtgtgataaacacaagggatttaatatatattttatctatctatctatctatctatctatctatctatctatctatctatatatgtgtataatccagctgcttagtggagatatggaatacatgagtgtcaagggaggaaaaaaaatttaaaacttaagtgatgccctgtagtcatgtataatagtactagtagcaacagcatagtaatggccagctgttgtcaggtctttaatatatatcagtcaatttctttcttttttttttttttttttgaaacagagtttcacccttgttgcccaggctggagtgcagtggtgcgatcttggctcactgcaacctgtgcctcctgggttcaagcagttctactgcctcagcctcccaagtagctgggattacaggcacctgccaccatgccctgctaattttgtattcttttaatagtgatgtggtttcaccatgttggccaggctggtctcaaactcctgacctcaagtgatccacctgcttcagtctccgaaagtgctgggataataggcgtgagccagtgcgcctggccatatcagtcaatttcttaaattactctcttatttctctaatattaccatattgataggacagtgctgggcacatagagacacttgtttactacagacaataaacatttgtttaatgaatttttggagcaaacataagaataatttccaaatgaaaggagtaagtcgtagagaaaatgagggaccttgtcctgatcatgcagttagtcagtgatggatgaactatttttgaatatcagctgcctctggatatttaatcatatttgcaccccatgtcaaagactcaaactttgctggtcttatcttgtactgattctaaacaagtgccccaaatttgtccaactttcatattccttgtctctggaatggggataataatacttacctatgaaagtaataggtaatatttttctattttgggaccatcctccctgcagatattggtgagtaaaggcctagagttcattcttggcttatggccaagattcgggggcagtgtaaggagttacttgttcatcttcagtctgaagggcaggagtttcgattctttttctttttttttcttctcactctgttgcccaggctgtagtgcagtggtgtgatcttggctcactgcatcttccgcctcccgggctcaagcgattctcctgcctcagcctcccgagtagctgagattacagatggctgccaccacgcctggctaatttttgtttttttagtagaggtggggtttcactatgttggcccggctggtcttgaactctgcccacctcggcctcccaaagtgctgggattacaggcatgtgccaccaggcccagcttcgattcatagacaatgattattttgggcagtccaaataataagagtatagtttcagtttggccatcaattgaaccgggattttaactaccagccagactcctgactcttgctgctctgtgaatgaaagggaaaaggccgtattcaccagagagttctcaatctgagagatcagcagaagatcagagtgcacgcggctctcagagctagaggggtaaggggtcctggaaggattatgttcttcagtgctatttggggtatggtgtaaagtgacaaaatttgtccccaaaacttttaaatctctgtttccttagctttttccatttctagtaggccctaccccaagttcactgccctttgactgttctgtattattctgcctccaaaaacctcaatgagaaactaaattatactaatggggaaatacttagtaggttcaccagtgtcacccaacccagaaaaacttttactttaaaagatcataattgaatcaaaagaataaatttctcatggtggcctttcaaaatttatggtaggttatggggctcactctctaggcaactcactatgcctaaggctggccttgggatacgtatcctgggctcctggactagtgtacaaggatgtagaatcacagatatttagttttgtgttatctgtctaatcattaacagagcaaatccaagacagaattgataactagaaagtgtataataccttagaaatattttcattttcattttaaaaaggaaatttgtttgaaatacataaaaagtaaatgtattaaggaaggaaaatgtcttaaaacaaaatatagcaaaatgttaacagtttgagcccagggagtatgtaatgagtgcttaccatccaattccttcagcttttctgtgtcggaaatgttttgtaataaaatgttgggggtaaaataaaatcaatagggatatgtttaatgcagtggaatgaatagtggaatagctagcattatgaacaagactgtggaagaacgtcttcagaccttcttaccaaatcatattatgttttgccaacgtgtagtttaactcaactagaaacattccttagtatttcaaccagcactatgaacacaagagtattatattttgaaatcagaaaattttagaattctggaaaggataattctagacctagagataggaaaacaagcccattgtatatatataatgtataagaaactctcagaactcagtaataaaaaggcaatctaattaaaaagcaggcaacggatttgagtagataattctccaaaggagatatacaaatggctaagaaacatgaagagtctcagtattgttagcctttagggaaatgcaaatcaaaaccatcatcagataccacttcacatccattaggatggctgtaatcaagtgttggtgaagatgtagagaaattggaatcctactactggtgggaatgtgaaatgggcagccactttggaaaacaatctatagtgttaccatatgaccaagacattctactcctagataaacacctaggagaaatgaaaacatgtgttcatacaaacacttgtgcacaaatgtttataacagcattattcagaataggcaaaaaaatggaaacaacccaaataagatgagttgataaatgcaatgtggtatattcatacaatggaatatagtcagcaataaagggaatgaagtattgatacatgctacaatataggtgaatctttaaaatatgctaagtgaaagaagccagtcatagaagactacatattgtatgattccatgtatatgaaatgtccagaataggcaaatccacagggacagaagggagattagaactgggaggtaagtgaggaggagcagtagagtaactgctgatggctacaaggttttcattgttgtggtggtggtcattgttgtttgaggtggagtcttgctctgtcacccaggctggaacacagtgacacaatctcggctcactgcaacctctgcctcctgggcccaagcgactctcctgcctcaacttcccaagtagctgggattacaggtgtgcgccaccatacctggctaatttttgtatttttaatagagatggggtttcaccatgttggccacgcaggtttcgaactcctgacctctagtgatctgtccgccttggcctcccaaagtgttaggattctgcccgccttggcctcccaaagtgttaggattacagacgtgagccactgcacctggctttttttttttttttggaatgataaaaatatcctaaaattgatgatggtggtgattcacaaatgctgtgaatatacccaaaagcactgaactgtacatttttaaacaggtgattgtatcatatgtgaaatacatcttaataaatctgtcatgcgaaaaaaaaagaaggaaaagaaacaaaattaaataaataaaaatgaaaactgcagagaagtagaggaacttgcctggagtccacgtgtcagtatggagctgagccttggggcacctgcctccatttcaggccgcttcgcttggatgctgcccgcttcctcactctctagatacctgaggctcattcttccatcccttcttttcttccttttcttcttccttccctatttttactcttttctttcatctttctattccttttttctttctttccttttttttcctcccttctttaccatctctctttccttttacttcccttctttcctttcttctttccctactcttttccatttcttctttcttttttacattcactggtcatgtatcctatctatcctgaaccaattgtgtgaagttgcattatccagaacctttaataagctaatgtgtatgtgaatcttcaggaaagaactagaggattcaatgtctcccactttataatagcaaatcctagacttcaggaaacagtgggctaaaaagatgtatgactatcattcattttagtcctagtttatttgctattttccttggagtgtggtcttctctctgataatcattttgcctattctcccattttaaacttttcagctctccttaaggcggcagcaaataggtgaaagattgaatgaatgggcagtcttcagtgaaaagaacaaggaactctgtgagtggttgactcaaatggaaagcaaagtttctcagaatggagacattctcattgaagaaatgatagagaagctcaagaaggtatggaatgcatggctacttaggttttcattcttcataaggcttatgtgtacttttcacaggtacagaaggtggctttactcacaattactttcctgtcaaaggagcagtatattttaaacattttatctttttaatataaaataaacttgcagctgggcgcagtggctcacgcctgtaatcccagcactttgggaggctgaggtgggcagatcatgaggtcaggagatcaagaccatcctggccaacatggtgaaaccctgtctctactaaaatacaaaacattagcctggcgtggtggtgcgcgcctgtagtaccagctactctagaggctgaggcaggggaatcacttgaacccagaaggcggagattgcagtgagccgagatcgtgccactgcactccagcctggtgacagaacgagactctgtctcaaaaaaaaaaaaaaaaaaaaaaaaaaaaaaggatatccagcataaaataaacttgcataaaaaggcctgctttacacataaaatatatagaatacttgcaatttgtgatgaaatagagcatctactattcagttcagtatttgggggtcttaattacctgttcagtaggaaccctttatatgtattatttttctttccttttttttttgttttttgtgtatttttttttgttttaaaaaggtaaagccactagagagaaactgaaagaaaacattcttaagataaattgaattgacattttctctctaaaatatgatttatagaccacagataggaattaagagtttcctgataattttggcttcatattattttaaaggtatgtatatcttatcaaattattttacatattcatttggatccaaaacatttctgatgtctatataaagctgatcaaatttgctagcattttaaaatttttgatgatttcggccgggtgcggtggctcacgcctgtaatcccagcactttgggaagtgagacaggcagatcaccagaggccaggattttgagaccagcctggccaacacagtgaaaccccatctctactaaaaatacaaaatattagccaggcatggtggcacatgcctgtagtcctggctactcaggaggccgaggcaagagaatcacttgaacccaggagatggaggttgcagtgagccgagattgtgccactgcactccagcctgggtgacagagtgacactctgtctcaaaaaaaaaaaaaaaaaaaagaattgggtgatttcagtgttgtttccacagtgcttgtgaacaatcagtgattttaatgttattttaatttgtgcttctcattagtacatatcaccatctaatgtacaatgtattttttgtatttacttattcattgtccaaatggagaccccactgatctgtcagctttccaggagcatgggctttgtctaattttgtttattgctatatcccctgcacctgaaacagtgcctaacttctcataagcactcagccagtatttactgcatttattctgaaaagaaatataaatggttattaggaaaaattatttctatccatatgcacacatagaaaattaaaacatccaaagccaacatgtactattaatgatgttacaaatctaatggatttgccattagataagcctttatgtatccaatttgcttatccattggataaatccaaatggataagcatttgtttacttgatattgtaaaacttaaaactcttggctgagatgatacagatttcattttagcatctgctcacggttgccctttgctaagttgctgggtgtcagagaatgctgtcagtgcgtgattcatgcactataggtagtagagtaaaatttgctatagaataaattttgattaagtttgtctctattctcattgctttttttttactaaatttaggatgtatattgtgagagtgtggggaaaaaaaccatctcttgaacaatctataaccagaacttaaaatttagaaaaatttcagcttttcatatagataattttattacattgtttggcacaatgttaggaatattatttaaaatgttaactatactacctcgtatattaataactcatgggtttttttttaaagggcttttgagttttcctctttgtggcgtctcttttgtaaaggaaaataacatcaaggtttggtaattttggcaacatagaaaaaggcagttgtcaactgggaagtgctaataagatgaaggaaaaagaaaaaggccattcataaaaaaaattgaagccaagatattagtgtctgttggtattaacactcaaaaacagtttgattttaaagacaatccaagaggattattttattataaatactttttaagtcttaaagtaattcccttgaaagaaacacttctcaataaaatcatctcaaatgtttgctgaaatattataatgttaataaatacattcaacgtattggtctttgaatcccattgtgttgaaataacataaaaaggagggtgggtggggctgcaggtatgaggacagcagtcagccctggaatggaataaagttttgttggtccctaccattcccctggggccctttggcttaggtaaatgacttgggaggatagctctgttaccacactaactttagaccaagagaaggttaaaatgttcacactcatataatacccgtcttcatatattattttgctgagaaactatttattacgtaacaggagcttaagccaaaaataaaaaagttgatcctaaagactggatcctgtcactgtggcaagagagtaagagggtcattggggatagcagtggcagtcagggggaggggattgtcctttcatcgtcagttaaatcacaccatttcgtgcttatctcttgcaaatagtccatatggagtctgtcctctttaactcaaacaatctaagagaagctagcacagaaagtgagtaaattaagaaggtttgaggcctgtcgattctctatagttaatagttattattattgaaagttaatttatcattgatttatttactgcaaaatattgacattgtatagaggattatctctttaaaatgaaggaactcttttaaaatattcctcacaaataacataattgacacacacattcacatttatatatatacctatatatcaattgcatatatatatgtgtgtgtgcattttataagtctctcagcaactatttgtctgagaatttattctaagtataacatcaggttagtgatgagagaaataaactataattttccaatattaaaatcttttaagttttattttttatatctatcttttattgttttttaatatgtatttcaagtaaataggaagcagcatcctatttatttcgagaacctctatataaaaatttaatcccaactctgcatacataccaaaaataataggcactactaatacttgtgcacatgggctgatatccacatggtattcctatgctcaaactacttccaagcagtagaaagcagtaatcatcatgtttctagtagagctgggctggatgtattaagaatatgctttctgacctctgtgattgctatttattacacaggattatcaagaggaaattgctattgctcaagagaacaaaatacagctccaacaaatgggagaacgacttgctaaagccagccatgaaagcaaagcatctgagattgaatacaagctgggaaaggtcaacgaccggtggcagcatctcctggacctcattgcagccaggtaaagaggacctgagtcaatagggcacgtgtgggcagtattttaaagcctttcagtctgcctttcatcagccaaagataatccaataaatcagtctctcttcctgggttatctcaccattttcaaaactgttcatgctcctctcataagtggcactttagttaccttgaaaattctcctcttactttataaatctcatgttgtttgtatgtagctgcgagaaagagagagagagtcatatccaaacaaaactaattcccaagagaaaattctttattttagggcttcatgggtattcaaactcctatcaggaagaaactgctgaccagtatttgtggagagtgtttttgtctgcagtagcaaaaaaaaaaaaaaaaaattactaaatctctgccatatttttagttagcaaggtatagaaataaatctgattattgccactctgctcagttgtaaaaatcagctgctgcattatagtaattttgtgttgagctttagtgctaactataagtgtttgcctcatacctaagaagaatattacattcactttctgttgcagaagggtagggttgggtaagagagatgaaagtcaaaaagaaaaatatatgagggtatttactagcaatataaaagtctaatatgaatgatgcactatgttataaaaatgttctatgctattaatataaaaaggagatgtcttattttaggtgaatttggcttcatgttggaacttaggcaccctgaggtcaggaaactttctccattgtattcactacatatcacaagcactaagaacagtgcctaaatacggactcaatgaatacttcagtgcataaatgaatatttgaatatttgagtaaatgttcttcatggcaattaggagagttggaatgttacaaatggtgccatttggggtccatcccacaatacgcttttaaaatctgggtttctttccttagccgtgctgcataaaagtggacgtgaaacaatgtcctctgcgtaccatgtgctcatcaaaaccgcatgtgggcaccacaaccctgtatgctgattttgaaaacattggatatatttcttttctataagagagttatcaaaaagtatctaactcaagaaagtgagattatcttttagtgacaatgaaacaaaatggaataaatgtatatcaactttttatttatttatatttatttatttatatttgagatggagtcttgctctgttgcccaggctggagtacagtggcacaatctcagctctgcaacctctgcctcccaggttcaagcaattctcctgcctcagcctcccaatccctgggactacaggcatacactaccacacctggctaatttttgtatttttagtagagatggggtttcaccatgtttgccaggctagtctcaaactcctgacctcaggtgagccacccgcctcggcctcccgaagtgctggggttacaggtgtgagccaccgcacccagcctcagctttttaaatgtttaaccatagcactgatatagctaacatttattgaacactttgctgattccaatgaccatgctacgggtttcataggcatctttttgtgtattgttcataatgtcctttgaggtggccttatcattatgcccattttacagatacaggggctaaggttgaggcttgtccatcatcacgcacacattgtgtggcacagcctgtgctcagactccaaagcgcgtgtcctggagtgctgtgccctcctgcctctcaagtttgtgacttccttttccctgttagagagaagacagttaaatggaagataagttctgtttttgatctcgacaatctaatttctcagttctttgtaaagtacttacaatgtgacagtgactgtgagagtcaagataaaatgacagaactgaaggagaacttctcctttgagaagttcaggatgggaatggagtaaaacaatgagataaataggagctctggaaaaggcactataaagagatggaaataatattttagcttaaactggtctcggagtttcaacaaatgtatattttaaaatcccagtgctgtgttcagtcccacttctccctcactaaaatgataacaaaatcctgtttcagaaggaggaattgaagtccttcaagctataaatatccttcttagggaaactgcctgtttggtaaacatcccccggggagttttttggtcaaatttgactcatagattgattgacatttccacgtaatccagttaaactagttaatattattttcctacttttagtgactcagtgatgtggagagtaaggatgcactatgtcaaagatattttaaatcagatttaatgtaatctagtcataagcagctaacttagtgtatgcccaactatgagccaatattacagcaaatgagtttgctgctgtctccttgaattcacatttatttataacatattttgtctggctgttcagtggagagttttctagatattaattgtttactttgccaaaagacatattaataaacttgaatcaattacatgtttataaggtacacatgcttctcactatagtcacttatacaatactaatttttgtttcctcttacataaagcctcagaatacccagataaaattccacaggagatttttgtatatatgttgcctgtttctaattgcctccttccaaattagactagattaggcactgatcattgagccatcctggagtttaacaccatgttagagtcacagtcacccttgcagcttctcctgaaagacacccggctgtcacatctgcattgcatttccttgtttattggtgcttcgttagtgcacagattggatgcatgtttcccacacccatcctcaactgtgaactgccagctgaagtattaggtttctatgattcagtccattcaccactcttgcctcttccagcgctgatgcactaaagcaaaatataacccagtgtatgcctttcgacatttctgtcctgtattggtgctcttgtgggaatggagaggttatttttgaagatgatagtatttttaggtgaacatctcagctaatagaaacatgaactgtgtctttaatattcaatcacagaagcaacaaaaaagaaaagaaaaagatttactgataacaaatctattacatacataaaaatagaacgcataatttagagtcaacttgacatcaccatcagattagtttagattactctgagtacaaaatagatgtgctttgcattgagtttttaaattgtgttgtcaagcattgtcaattttttagggcaacaaaagttgctcagttacttttaggactcagtgaataatgttctagtgtcctttccatactttctagatctgctgtatgtaatacagcagtcactagctacggatggctatttaaattacagaatatttaaattaactgaaatggaataaaattaaattactccttaattttaattatggtcagttgcactggccacattttaagtggtcaataaccccatgaggctagtggctaccttattggaccctgtacaatgcagaacatttttatcatctcagaaagttctgttgttcagcagtggcctagataattaaagtacctctgagcccttggctttttttaaaagtcaacataagaagctgtcattggtgacgcatcactctaatttctgtaaaactgcctttaagaatactggctctcgttttgtcaatgaatccagtgcagaaaatccacatagcaatttctctagagctcaggactaaaaggaaatctgtctttttagtattaattcttcaatgtttcttatcacagacaacgaattagtaacatttctcatcttagcatctaggaaggtcaaattcaacttgcgcactctgttgtgatgatttgggggcagggaagtgggtaactggaccttctaatagagaaaattctttttctctcggctaaacctaaatccccatcaccaaggcaaaagcatcctttagttatttggctgttatctttttgtttttctcaatagcagcttttttggggatataatccacatgccgtataactcatctatctaaagcatgtaattcagtgattttagtatatttataaagctatgcatctattactccaatcaattttaaaacactttcgtcagtcccaaataaaaacagttacccattagccgtcactcttttcttccctcctcttccttccccacttctcccagccctgggaaactactaatctactttctgtttctacatgtttacctgttctgaatagttcatatacataggtcatataatatgtggccttttgtgactggttgtttttaatctctatatttattataattgcctcaacattttgtagaagtagagtaaaaacaagtaattttttaaaatgattgaacgcctactatatatgaagtactatgcttcttgctatagggcagaggttggcaaatgttttctgtagaggaccagatagtaaatatttttagttttgtgggccaaatagtctctgttgctattagcgtgttattatagagtgaaagcagccatagaaaaatctgtaaatagaaaaccatggcagtgctcccacaaaattttgtttaccaaaacaggtggcctgctctagggatataaagatgagaaagaaaatggtccctaaccaaataagtgtcataatgcaagtacacaagcgttcctcactgcagggcctcttcctttctattctctcttcctgggcattctcctgcctgcccctggcctggccagctcctcattggttcttcctgtttttccttctctccagattagatcagattcttcttacgggctcagtaggcttctccttcatagcatttccctgaactatgtgaaatcttgtgtgatcagtcattttaagcctgttttctctgctaaaatgtaagtgtatctaaccttgatcaccatagtagtcccagcccctgaccttgttctttgcacatagcagtcactccagtatttgctgagtttctcaaatctaaaccatagggtggaaaacgtacgcacacaaatgaaagcatacacaaagcaaagcattggcttcgggcttcagctgcctgagtcatagcgtgattctgcttcaccaacttgcttatcttctcagcacctcggttaccacatgtataaaatgagaatcataatagtagctagctcagaagaatgattagtggtttaccactgtattagtccattttcatgctgctgataaagacaactcgagactgggtgatttataaagaaaaacatgtttaatggactcacagttccacatggctggggaggcctcacaattatggtggaaggcgaaaggcacatcttacatggtggcagacaggagagaatgaaagccaggcaaaaggggaaaccccttataaaatcatcagatctcatgagatttattcgctaccacaagaacagtctgggggaaaccacccccatgattcaattatctcccatcgggtcccttccacaacgcataggaattgtgggagctacaagtcaagatgagatttgggtagtgacacagctaaaccatatcaaccgctaagcatagaatatgttcaatagaggtcagctctcatcccagagggagttcaaaggctgtggaggtaaaacacatatgcagtgcaagcaaggctttgtgaagttcctagcagctgccctcaggaggactttcagtttaaagggtgttctacccacgttggaggtcaaaggaaatgaaattcttggaattcacggctggtattacctaagggtgtttgagtcggaaggtgcctggtaaggatcaggaatgcattgatgcgatgagcacagaaacagcacagaactaatcaagaggcctgagtttagtccacctggttcctgctgtgtggcccaggtcttactgagtaacttctctgagcctcaagttgctcattttcaaagtgttaatgaaactaactgccacatctccaatgagaaaatgcaagggaaaggactgtgtttactataaaacaatgtctatgccagtctcattcttttagaaacctgcagagtattccatagtataaatataccacaacttatctaggattttctgtatcaatgaacattgccatttttgctctttgaataattgtatctttagagctttgccttgtctcatatttagttcattggaatacatatattatgctaacaataataagcatgaaaaaaatttcaaattttttaactccatgaggtaaactaaataaggtaaaagaaattaaactaaggaaattatgacaataaaatgttttgaagacttcaggttttttaaaatgttagtcataatcaagaaaaaaacaaagttgcctatagtggtagattcataaccaatatatttctttaatcaaagtttaaaatattttcatttctgattactaaaaatacattaatataagaagaatgattgttttataaaagaattcacagtacaatatctttaagtactatgttttctagaatttatttcttatataaaatgcagttttctttaattttttatttttttttttgagattgggtttgcgctgtcacccaggctgtagtgcactggtgcagtaatggctcactgcagcctcagcctcctgggctcaagcagtcttcctcccacttcattacctgggactacagatgcatgccactgtgcctggataatcttttgatttttttttttttttttttttgagatgaggtgtcactttgtaacccaggctggcaggtgtatttcctttttttttttttttttttttgagatggagtctcgctctgtcacccaggctggagtgcagtggcgccatctcagctcactgcaagctctgcctcccaggttcacgccattctcctgcctcagcctcccgagtagctgggactacaggtgcccgccaccacgcccagctaattttttgtatttttagtagagacagggtttcacagtgttagccaggatggtcttgatctcctgaccttgtgatccaccaacctcagcctcccaaagtgctgggattacaggcgtgagccaccaatgtatttcttttattaagaaaatgtgtttcctgtagtgttctgttttaaaaacagtcaactcacatgaccagaaccagatgctttgttttattttagttacaaatcatcatgtagtcctttttggaaagaacttagcaaattttcattatttatttaatatttattatttatttgtgtgtagtttttaatcccctaaaggatgtaaagcatccagcattaatcatattttattgaattataggaattaataatttggggacttattttctttaaaagtataaattattaaattatcatctgcttagtgcagaaagtttggaaactcttgaaattcacaaaagaaaaagagttacctgaagaccccctgagcaaatgaatatagttatttttttaattgtcttaaaatgaaaatgttatttttgtcatctacatgattatttttaaaggacaaaagttttgcatatgtaagggagaataatatttcttccttatttttcctccccaaatagtctactcaaagataaagagcatgtactttcccaccttcgcaaacaacccctaaaactcttgcatacactaccgagctggcatactgaacccaaaaaagaaggaagttactccttttgctactaccatttgctgtgtttgtggacattttgtttgtttgcagtgggatgatttgttttctttaaatagctttcccagcataacaaactgcccgcaagaaaagttgactgtccttacagaacagcagagtgtgtgcagccgatgttgtttttgctgtcctttctttagacctgtagcttcctcctccttacagattacactgagctttttccccttcttacactcgtggcctacattccaggagatcaagcctggcacatgttaatgaatgtaggttttatttagaaacatgaccacttgtcactgcccagtgtcatgttatcgggcagagactaccaacatttgtctacagtgagcattttcatacttctatacacagacaaggggaaactttcatccccacgcaggatatagctttttgctctgcagagtctaacttttgcaagtggaagcttcatggtggtggcggaggacctgagtgccctgaggatggcagaggacggctgtgtggatgcagatctcccagattgtaactgcgatgtcacaaggcaggcatcttcttgagtttcttccattgtacatagctttcatgttacgtggggtttgtaggatagacgctggaagccttaatccagaactgtttttgccaatgttacatgaagaggattggtgttgggagatagctggccatgtggactcccaagagttattcgttggtttgttttctagtacctctactgggcatgcagagctggacaaaaaggttaatggactttattatgactctgtattccagttgtctctggaccgtatgcgtcatacaaggagtatggctagagtagagaggctgagacacaggaaagcgatccagaaaaagactcagttagtccatcatctgctatttaaaggatgggcttctgatgaaactgaaatttagccttagctggttcacagctttgtagttgaaagctttcctttcatgaaataaaactatttcagggctctagaaaatgctgtgtgtttgagaaagttgcttttgtttgtgcttgtcagtaagttttagtccctaatatgaagcttataaaatatatgtgcaaagtgtacaaattaatgtctaaaatagtaatttagtgcattatgcaaatgtttagttcatgatttttttcagttagaataaaaatatgacaggaatttttttaatatgtttttctttactgtatcatccctcagataaatttctacaaatgaataggatttacccaatggtaatttttgttctattatatttagaatttggactttttgttttgttttgggttatggatatactaaattactttgaaggaaagtggtgaaatatagatacaatatatatagatatataagcatatatgtgtaagtacgtatatacatatttatgtgtgtttgtatatacgtgtttcagtgttaagaagctggacatttggatttcatagtagaatccttttcaagaaaggtcaagtgcctgtgatacacactggactgtgaaagaaccataagctgcagggacttacagatttatcaagctgctaaacttacccagacatgtgacgtctgcaagtatctaatttgaatgataatcctggatgcttaccaaaagtaatgttgctcagacttctcacgatgatagataaataaaaatactgtgacgcttcacccaaaaattatctttaaagaaataatggaaagaaacatgggacatttctcctaaaaaaaagaatgatccctgtcctgcaaataaatgtcaagtttaataagccaaggcttattaatcctactacccatgccctacaggctcacctctgctcccccagcacacatgcacactgtattttgctatttgtagtaaaaacacaattttttaaaaaatgaaaaagaactgcttaaatgttcacccccgtcgactttactaaatttacacatttgtttgaaagaggaacttgtccctaatggactatatgaacacacatttccatgtcatgatgcccttgacatattgcatactaaccactctgacttggaactcattcgatattacaaaagctatcctgtaatttatttttctaatgtagacggtcctatggaacagtgtttacttgcatccttttgtgctttggatcttttgatcatatttgtgagttttgaaccaaaaaaacgaatgaattttagtacttgacaaatagagcactggcaaatgttgaatctagaagtaaaacttaatacacacttaatatcaaataaaaattttaaaatgaaaacatgttaattaaataaacacaattcgcttagaatattcattattaatgtttagcaaccacttaaacagtacccagtttagtgcaaagcactgagtttagcatggccggggtagggaaatagccaaatatagaaattcacatttccagctttccaaggaagttaccatggaggagaccaattaatgcatgaataataccagggaactaaaataaggaagggagaaaacaagcactccaacctctagtaaaaccctgatgacattaccatccccaagcctagtaagtgttcagatcctacgaaatctgaagtcatgcaggagaggctgctgagaagacattcctacagatgtaaaagcaggacggacctctctgtgctgtgtgccattcttcaggcctcttccagtgggtttattgatggtaaactcttctttcagtctggggcactatggccagagccatgtaaaattccatgtccatgctgtggtcgatcaaatgcactccatgagctttgtacccagtagccataataaaactgtcattcactgactgatgcccagatgaattttgtcttagccatgagagaaatgtgagtgagttgtatgtaaaagttcttggaaatagtgttcaaggccaatgccttgaagtgtctgggggacagggtacaatttgtatttataaagctaattggggaaatcttatctcgagtggaattgtaagtcacaataaacattgtaacatattttcattttctaccaaaagaatatattgtgaaatatgaacataattttttaaatacacattttttaaaacaataaaaggtaatgttcctgagggtttttacaaactgaaagtgttattcaaatagaagtattattaattacaattattaaaatatagatattattaacagctgaccatagtgaaaatcctttaagagcatttatatgacagtgctttgaggaaaaatgacaaaaaggaaaagcgatcatgttgtcaaatgactacattttcacttgagagagacacattgatttattgaaactggaacagaagtgatgataacaattttaagcaactaaaaataaatcaaatgttcaaaatactttgattatgagacattttcttcggaacagtgtgtcttgatcagagaaacgtatcagaaccacctggcggtggtggctggtagttggcacctgtggtttgaaagcaccctccactgactgtgtgacaatcccagcttgagaatcacttctttaaatgcctggaagtaatgtgggggtgggggagggggcgcgaatatctgatgactctaagtgtataagttgtcaatctttgagaacattctattgcagatccctgcctttaaatgtatcacaaacctagagtcttacaagtcatgttgctcttgacatattttcaagaagatagatacctcttcagttgagccaagatgacaccctagcagcttgaagtattttgctcatctgctgtttacctctgttatgagcagtgccaattaggtggccatatttcctgaaccaaaaggcgagactcatagtctaaaggtagcagcaatttttaaataagggcactaatagatcattgatcatatgcttattatcaccatgacctttctctttagagcaatctgtgtacactcagccatgtcaggctcttaacagggagtcaataattgatttttgctgtaagtaggtagtaatggagttgagaaatactacctgtggttcttcccaaacttctgatcacaccttgctcacactgggaaaactgtgttcaaaactaatttatctatctctgctcctgtgccctggacccctgcctcctctgcatccttgctcctttgtctgtattcatctctaatttctatcctcctttgtcttctgtctttggcttcttccacatgagtttctaactctgcctaaaaagattgttaaagcccagtgttctcctctgcacgctagagaaacatgagtgggcctctcgctgaagtgggacattcccccttctctgcccacagggtgaagaagctgaaggagaccctggtagccgtgcagcagcttgataagaacatgagcagcctgaggacctggctcgctcacatcgagtcagagctggccaagccaatagtctacgattcctgtaactcggaagaaatacagagaaagcttaatgagcagcaggtaagacttaaaatggaaatggaattaataagccatggaatatctgtcctcctggccaggatgatggggtgggcatgagatggtgcctggagatggaaggtcagcagggagctaggcaggactggtgaggaagggggctttgcctaggcaggcgattgaggccaacaggttccatgtcactgcagagttcagccttacaaagatggttgtgccattgtacagttagtgtcatccatccaccaagaagccttctaagatggtaggtaaggtggagttgcaattacgtatctaaaacagtgctaacagattggtttatttatttgagagtcactagccctagcccactaccatacacttagacaggactgaaaggagcccccctgcccccgactttttttcctgtgtatagtgtttggggaaagattacaaggcatacttagaatttttcaagttgaaaaaattttgttttgcaaaaaggattgcatgacctgcagatcgcacacagtaattccactttcatgtgtgtagcaaagacagaatatctcactggcggcgtacaacccaacaaagcaaaaagggatgatcctggaaaatgtatacagaagaaattttcacctcccattccctccctcatttattctttctttttttttttttttttcctgagacagagtctcactctgttgcccaggctggagtgtagtagtgcgatctcagctcactgcaacctccacttcccaggttcaagcgattctcctgcctcagcctcccaagtagctgagattacaggcatgcaccaccatgcctggctaatttttgtattgttaatagagacggagtttcgccatgatggccaagctggtctcaaactcctgacctcaagtgatctgcccaccctcggcctcacaaagtgctgggattacaggcgtgagccactgtgccaggccccctcatttatccttgctaagtatatcggactccagttgccaatagcaaacactgtaaatcctccgctagaggtattgttactccatgcatttaggttgctttgaatattctatccacactctggttctctccattacatttaggccattgcagcaaagttgcttaattttaaaatgctataaaatgtaaatacctcctatttttaaaatcttatagtttatgtacttacttcattttacagactatttaagccaatgaaataggtgtcaaaatacagttttgggtgttgaggtttttttaatattaaaattatcattaaaatttttttctttctaatgaatatatagtaattgtacatatgtgtggggtacaacgtggtgcttcaatgcatattttcatagtgtaataatcaaacaaactgaggtaatttgattaccatatctatcactttaaacatttatcatttcttacaatactcaaaatcttctcttctagctatcttgaaacatacactatattccattgctttaaaaaaactgttagcaagacgtttttcaatttttatgaaattaaagttttctgatgggtggtgatgtttgagattctgatgattgaattgtagggatcctggttggcatccggcttcccagattcttccagagaacatggtaatgatgtctatagtgatgagttgaaatgcaaatggcgggtatcgtaatttcacaagtgtatgaaaatcaacaaaatatctagttaaatatggcaaattgatcatatgtatttatagccccacctactactaaaaccccaataaaatgatggtagagagggaaaaaggttaaaaccacaatggcaaagagaacaggagagaaaatggtagagatgacagacatccaacataattttgcaagatagaaagtggatagatcagtgatgttgttaacagaatggagggtggagaaagttgattcatgccacagagttcgaagaaggctcagaaagtggagatcaggtgaagctgaaagttgagttgcctattgagctgtaaaatggaagattacttgaaaatctgaataaggtgtgctgagactggcagattcctcctaagcccagccagccagggaactctgcttcctttactcaggtagaagatcagatgattactctctggagaaagcaaaccagagggactctgggtttggggatcaggacaccgtggaggctagagtcactatgttaaaaatggggagatgatgtgactggctcaataccaaatgctagggctcccagcccgcttccccagcttggctcccactatgtcagtacccaggcttacaccctagccaggagattggagcatcctttctggagaactgatcagacaagcaaaaagtaccttcaattagtgatacttaaggtaacccagaaaaggccagacccctgcctaactctccacagggaagcctcccagttgacatactttaggtgcatacacagcttctatagctgactcattcttgaatatgtgtgggtaggcaagaatcctcaccacttaagaaagcttctaccattaagaaaaaaaaataaatagagggaaataaagaaaggaacaatcagaggaaacacattgtagagaaagaaaatgtaaacaaaacaaaacaaacaaactcacagaaatgagaggttttgcattcataaaatgataggatgccatttttctttaaaaaaagcattcagaatggagactatcttccacagagtaaaacaaaaagataaatatatgaaaaataggagagaaatatagacataaacataataaaattaacaataatgccagagtttcaaaatccaattcagttattttgtaaaagtcccctgctaaaaaaaaataaagaaaatagagaggagaaaattaccatagtagtaatgtaatatatatatttattattaaataatatatgtttattatgaaataaataatgtagtaatgtaaaaatatattttatatatttattattaaatatatatttatatttttgttacattactacgatgttaattttctcctctccattttctttattcttttttggggggacttttataaaataactgaattggattttgaaactctcgcattattgttaattttattatgtttatgtctatatttctctcctatttttcatatatttatctttttgtttactttgtggaagattacacgtatatgtgtacacacattacacatatgtgtgtgtatatatattcatatatatatctaaaatgaaaaacatgcatttgcagatgataagggctgtatgagtgcccaggaaaatgtaaaacaaagcaaagccacactgtaaaactgcaaaacacaagggataaggagatcctaaaggtttccaggatgaaataaactctggcttctccaaaacaatactgggagctggaagacaatggctctaacttcagaaagcggagaaaaattctttataatttagaattttataccctgccacttaatatctacaaattttacctcctatgtacccattttcaggaagctaatgaaaggtatgctgcatacatgaaagtgagaggaaaatacacttcatacttgctacacaggctacgtactactatgctatatatgctgcatatgctacacgcactaaagcaagaggggaaatgctattcaactcaggagaaagaaaaagggaattcccagagtgaaggtgcaggaaagtccctgatgacagctgtactgcagccaagccagcacctgtccagatgggagcaggggctctgggtgctctaggagggatgtttccaggaggagccaggaggggctagattatctgatgggcttaaccactccggaaggagttttattagttcaataagagagataatagaagcaagcattataaattagagagagagagaggattgtaaaatccaggaaaatgagttatcaggagatcgagaccatcctggccaacatggtgaaaccccgtctctactaaaaatacaaaaatttagctgggcatggtggtgcttgcctgtaatcccagctactcgggaggctgaggcaggagaatcgcttgaaccagggagtcggaggttgcagtgagcggagatcgcgccactgtactctagcttggcgacagactgagactctgtctaaaaaaaaagaaaagaaacataaccatagtatattttgttcctcaaatgtgaaaaatattaaataaccataatcatgagaacagtgattattaccctagctctaagttgtactgtaacagtcattagagttcagtcagccatgtagaagtttatttcttctctactatacaagaattcataaagtatggacaaatcaagcagtagctatgttacttagaaatagagaagttatatattactgagaaatatagaaataggttgaatgtggcggctcacccctgtaatcctaatacttcgagaggccaaggcagaaggatcacttgaggccaggaatttgaggctgcagtgagccataatcacacccctgcactccagcctgggtgacagagcaagaccctgtctcaaaaaattaaaaagggtagaagtaataccagaagaaagagctgcaagagatggaaatggttgctcctgaacaggtgaactccggggtggaaaacatgctgctttcttcagaacctgctagtcgttttttactttttactacattaaatatgcacatatagctttttaattaaattttaaattaagactttaaaaagtcctgtacaccagtggttaaaagtaaactttctgggttcagatcttggcctcactacattcccatgtgatctgggacaaagccataactatttgaacccttagagccctgatttatagaacgccaatcatcagagtccacaccacacagtgtgattatacaaattactaagaagaagcactgagcacagtgcctacctaacacaaagtcagggcttgatacattttattttaatcatgtcacagttaccacagtttcccttgtggaaaatttttaagaatgattctgtccctactaaaaatacgaaaattagctgggcatggtggtgcgcgcctgtagtcccagctactcaggaggctgaggcaggagaatcgcttgaacctgggaggcggaggttgcagtgagccgagattgtgccactgcactccagtctgcagacagagcgagactccgtctcaaaaaaaagaaaaaaagttgaagctgagcctaaaactttgtcttagggcacttatgtatgattataaatcccctcaaatcttagggttgctatttcatatattgattttaacaaaaacttttgagtatttagggaaaatgaaataaaaatgctaactttcttaaatgcatggtttatgtccaggggcctaacacttcttccaaatgtatatgcttgcacaaaatgtagtttaagacctcaaatgtacttggtaatctcatttacagaattatttgtctttatatttatctttaagcaaatactaagtttaatttttatattacttcattttatattttttagaacagcaattcctgtgacatattgtttcatgtaagtgaaggaggttatgtcagagatttgaaaggactgtttatacaaatataaatattttagtaaaatttatcgtctagtgtctagtttataaaatctccaaaattaattaaaggcactatgacatttgacaatagctagtgtttgcatagatgttggaacatggcatcaaggaaaaaaataagaggaagagcaacacaagaatataaatcccgggtatctgcgtaaattgaggaatttttagagcaagagaaaaaataagcaaattcaagaacttcctgataaaagaaaaggaaaacacattaaggacattgatgaatatagtaaacaaaaaatgatactggtagagcttacttttaataatggaatacttacttggagtaaatggagttaaaagttcaatagagaaaacaacatacaatttgaatttacattttatacagttaaaatgaagatttcacattgtgggactccagggaaatccaatgctttgtttttatcataaaacattttacttctgccctacattaaaagttgctctatgccaggcgcagtggctcacacctgtaattccagcactttgggaggccgaggtgggcggatcacctggtcaggagttccagaccagcctgtccaacatggggaaaccccgtctctactaaaaacacaaaaattagccaggcatggtggtgggcgcctgtaatcccagctactcaggaggctgaggcaggagaatgaggaggagaatcaggcaggaggttgcagtgatctgagatcatgccactgcactccagcctgggcgacagagtgagactccatctaaaaaaaaaaaaaaaaagaatttgttctctgaggaaactgctgatgtcatgcatgatatagaacctaggtcccttaaatagtctttctacatctttgtggggcacatatgatattttgttacatgcataaactgtgtaatgatcaagtcagggtatttggggtgtccgtcacctctggtatttattatttctatgtgttgggaatgtttcaatttctctcttctagctattttgaaatatgcagtacattgttgttaactatagtcattctactctatcgaacattaagacttattccctctaactgtatgtttgtgtctattgacacctcacttcattgcccccaaacactcttcccagcctctgctatctggcgttctactctctacctccatgagatcaacttttttagctcccacatacaagtgagaatgtgtgatatttgtgtttttgtacctggcttatttcacttaacatagtgacctccggttccatccatgttgctgcaaacaacataatttcatttttttatgaccgaataatattccattgtgtatatatatgccactttttctttatttgttcgtccattgataaccatgttaccttttaatgatggtggaattaactgtttaaaaaagaatgcaaatcagctgggcgtggtggctcacacttgtaatcccagcactttggaaggcctaggtgggtggatcacctgaggtcaggagttcaagaccagcctggccaacatggtaaaaccctgtctctacaaaaatacaaaaaccagccaggcatgatggcgggtacctgtaatcccagctacttgggaggctgaggcaggaaaatcacttgaactcgggaggcagaagtttccatgagctgatattgtgccattgctctccagcctgggtgacagagtgagactccatcccaaaaaaaaaaaagtaaatctttggatcttaaagcccagttcttgagtgccaggtctagcacatgcatatatacaggcccttggtatctacggttctacactggtggattccaccaaccgtagatcaaaagtatttggaaaacaatttgcatctgtattgaatacatacagactttttattcttgtcatgattccctaaacaatacagtataagaacaatttctatagcatttacattgtattaggtattataagtaatctcaagatgatttaaagtgtatggaaggatgtgtgtaggaggtatgcaaatactacagcattcaatatcaaggacttaagcatccatgggttttggtgtccgagggaaggtctggaaccaatcccctgacagatactaagagatgatgattgattgattggaatgaaagtgatgtattcgtgaagtagagtctggggcaagattcattttttattgattaaagaagttagttttactcttagtgtagaccatttcatttgttcagtttatattttggcattgctcgcatagccaaaatatttctacatccattttctagtacttttgagcttgctggatttcataaatgaggctcaataaatgtcatacattcaaggaaattaaatatttgtcaaggtgtagcctagccatttaccaacataggttgcttcagtttctctcatctgtatacatgtaattgttgaataaagcctgttacgttcccctgcaggagcttcagagagacatagagaagcacagtacaggtgttgcatctgtcctcaacctgtgtgaagtcctgctgcacgactgtgacgcctgtgccactgatgccgagtgtgactctatacagcaggctacgagaaacctggaccggcggtggagaaacatttgtgctatgtccatggaaaggaggctgaagtgagctgggatgctgaaacagatagggaagaggaaagaccaaaaagaaaataaaaatcacccagagtatccactgttcactctttcctgttcgttacaatgtccaaaaatagctgtggcttcccaaacttactattgtctacatttagttgggaaaataagtaggtataaaggtaatatataaatataacaagccaagttatgtctgacctaacagttgaaatataatacggaaacataaaaatacacccttgtcaaacaagcataacattacagaatgtgtggctgtgagaacagtaacattcttttattaaaaattaaataataaaagcagatttatctttaagccctttgaaattcaaggtggcagaaaatcgtgctgtgttacaaagtgatcatcatggctgtgctctctggtaaactgttgaaagcttaatatttgtcctgctgtcatagattaacttttgtcagtgtgagttgaatgttggacttaaatggattttccgacctcgtctttatttccgtaagacactggcctgagtgcacactgtaaacctggtgttgcttttctaaacttggtgcacacattcaaggcagctcgtgtgatgtgcttgtaattttcaatttgactaattcaaaatccagagttgcaggacgtgtttttaaaaaaataaaacagccgttttattttagctcaagcagttgtctctcttgctctctggtcaaatttggctcgaggaatggttatcgtttggcacaacagttgcctctgtgggcacccttaatccagtcgcaggcagcagaccgggttctggagcgaaaacagtctccaataatctgaatctgttctttcattttccgccccagaatcgaagagacgtggcgattgtggcagaaatttctggatgactattcacgttttgaagattggctgaagtcttcagaaaggacagctgcttttcccagctcttctggggtgatctatacagttgccaaggaagaactaaagaaatttgaggtaatctataattccaaatttttaatccttattttgctattaaagtagccagctggtagttggagttccaagacctaaactagctgttcaccacatgttatctgctcaaattgctgcgtgaggactttgcagccatctttattatgacctcatacgtagtcatacgtatgaagggggaaaaagaggtttttattttaagattatcaagaagcataaatactgtagtaatgaagagagattctattagaaaagaagaatcgtgattcctcccaaaagatcttggcatgatttttatttcagaattattccacagtcaaccatcttttctaagattaaaatatgatttttttaaaccataaaaatctaccttccacatacatttttgtattttctttacctaatcgcagtgtgtgtgtgtgtgtgtgtgtgtgtgtgtgtgtgtgtatttgataaaagagttgactctagaatggaataaaacattttcattataattcatttctaattacacagtgaagagtagtactggtcttgagtcaccaaaacttttcaattacactgagatgaaaatagctgtagtgtaatcatattcataaagaaagaagttatccaagaattgattccaataccttgcctgcttgcacaatctcgagtccactctatcactgttgtacaatgaagctctgacttctcagctgcctttcattttcatggaagacctgacctagcccaaaattgaccatttttaaatttgaaggtgtttttcccttcagttcccactaataggcagttgtgtactcaggtatgttaacagcaaagagttcagaagcattctgaccattgctaattatgcccccaagttcctcgagatgtttagaaataagactgaaaatgtaatgaaatgtagctgcattcatttttaccttgcaacatcaggtaaccaggcattttctgaggcctatgatgggaaataagaagttcgcttttttattcttatggagtttaaaatctcagggttgtacatggacagctatatgaatctagaaaaatgttcaaatactttgaaatggatgaattactctgatgtctgaatggtgaatgaattcatatgtaactataccactaaattaaaataaacaacacttttattcctatataaaagatactcccttagaaaactactagtaaaaagcacagtaaactctgcagtagattccaggtcatctcgatgtgaatgaatgctagtggagagctgctcaactgcatcttacacactcccttcataaaggttaaaaccttttataattggcttatactgcaaagcagattatataagattctttttgatgctattttagactctcagattttaaagcaaaagttagccttatagttagcttctataatgattgattttattatttatcatgaattttgtagttaattttcttaagagacagaaatgaattgcagaaacgaagttgtgcttgggggcagtctttagctggtccaatcgcatgaacgtttgggatggacatgggtgtgctggggtatctgcctgggggtactccaaccttaccccagtgggcaaacatgtactgggacttccagtcatggccagagctgaactttccttaccactccctttgctggagaaataacttaaggtttttagactggaagctaggatttcctaggatgaaggctctgaaagcagctctcacaaggaaagcaatttaagagacagaaatgtggtcacatgtaaacagtgtgatgagccaaggaaaacagaatttggggatttgatgagtgcggttcaatttattaattatagttttcattttggtctaatgccaagataaaaatcagtcataaatcatacaaatgattttttttaaagcttcattttattttggccaaatgactcttatgctatagggctcttctacattggagggaaaaggcagaaaagaatattttaccttcagaatctctaaactgaccctgggatagcctcaaaagtaaattgatgctactgtgtgggtggtacactagctctaacatgttttataaaaactaattaaatcacaggaacaacaaaaaagaaacagagcatgttccaaattttttaaaatataaagttacttgtattttactaaattacttttcttaaaagcttataatagcttgattttttggaagaccttttgcaaaaggtagttttaagttttttcctaatggacagcagaattgaggtaatttctagatttttagaaaagtacatattttacaaataaacagttccattatagatatctttttctccatattgacagcagaagttgtcaacatttcaaactcacatttccacacacacgtgtatattttttatagtggtttgctttgtgggaatatttgtttccaggacattaattatttttaaagctacgtgtatatgtgtgtgtatgtatgtgtgtgtgtctatatatgtgtgttggatgcgtgtgtgtttattcattactactccccattttcatattttttgatagattctccctttcctttaagttacgctgactagatgactttgcattaacaaggggaagtgtaccgttattagacatcattctttccctctgtgatagtgtaacttcccattctcccagacgctacaataagaaaaccaggagccactactgagagtccttcgctgatttctcacactgatatgcttctctgtggccttaggctttccagcgacaggtccacgagtgcctgacgcagctggaactgatcaacaagcagtaccgccgcctggccagggagaaccgcactgattcagcatgtagcctcaaacagatggttcacgaaggcaaccagagatgggacaacctgcaaaagcgtgtcacctccatcttgcgcagactcaaggtttttgctatgcctcatctgtaatttagaggccagaggatgggactgggccatttgaatgcagtcttgagacacagtctcagtgattttgtaagaatgggatggcaggaggagtaaaccggggagtgatatagcaaaggattgcaggcttctcattgcttgctgagaaaatgactttacagaacactggaattcgctgtgccatctccatatgtttagaaggacttttaataaaaataattgttactactttcctcttgccttccagcattttattggccagcgtgaggagtttgagactgcgcgggacagcattctggtctggctcacagagatggatctgcagctcactaatattgaacatttttctgagtgtgatgttcaagctaaaataaagcaactcaaggtaatagattatttttcaagttaccaaagtgaagaaagcctgaaaatgaaaggatttgtggctcttttgtgaagaacatagcaaataacttttcttttgaaaaattagttctggactgcaaaaaaattcagaaaatgtaaaatatataaaaaatcagataaagagcactacccagaaataaccactattgcttatatctgggtagtgctcttatcttatttgatatcgatattgttgttgatatttttcaacagcttgattgattttcaatcagcttgattgccagggtgttagggatgttctgctgttgttgttttgttttttttttttttagagagagtctcactctgtcgcccaggctgaagtgcagtggcgcaatcttggctcactgcaacctccacttccctggttcaagcaattctcctgcctcagcctgccaaggagctgagattacaggcacataccaccaagtccggcaaatttttgtatttttgtatttttttagtaaagatggggtttcactatgctggccaggctggtctcgaactcctaacctcaagtgatccagctgctttggcctcccaaagtgctgggattacaggtgtgagccacccttcctggccttgttgttgttgttttcgtttattttttctaatgtgtttgtagcaccttcacatggttcctttaacctccatgttgcaaagcaatacaactttcctatgtcgggatttcattcctcatagtctgcattcttagatgccaagttaattttaaacacattttgtatttttcactatataattcaaacacagtggctagctagaaattcgaataggagggatatacattagatgtaaggatttcctaaaagtgggagtatttaacaaattgagtgttttccaaggaagcttatgaaattttcctcccaagatagatggatttttttaaagaatggtcatgacgcccataacctttgggttgttatgataaaacaaggaacttgcccgtagacatggattctcaggatggaagaaacagtaaaccctgctattctgcctcaccctctcccctgattcctctctcctgtcatctcacaggcgaatcaacatttacatccttccacagaaagtttctgccaagtgtaattgaatcttgtcccttgggaccctggcaggatgatggaaattattactaccctctcttctctcctgggagtctttttcaccattggacaattcagctcttccacaatttattattgtattgaattaaaagtgaacactgaaacatacccagtgatttaaatcttttgcaacacatagaatgagtctaaataatcctcctggaattccttgtttttcaaatcataactttacctgcctatgttctgaaataataaaagaatcacctgagaagaaggcgtggcattggatggcttctcttagtcatgtttgacataggatgaggatatctgaaattaaaatgatcgggatatttctttaaaatgctacatttatttcagtgacagtatattgactgccattgctttcattagggataaccagtgctgtcaacttacggtgggtttgaatattttcccctgttattctctacccacactacctgtgatggtaaattttattagccaaaagcgcttttctgatcatggaattcgaatgtttctatttatgactcctgttctggctgaaaatgcatatgttttactttagaaggtaatagactcttgtcttgtgattgtatatggtcaattaaatagcccctacatgtcttttttaatgtaatgagaaatacatctattatgattcttttatatcaatgtaagcaacaacaatagcaaaatcacatgagatttgtactccctaggccttccagcaggaaatttcactgaaccacaataagattgagcagataattgcccaaggagaacagctgatagaaaagagtgagcccttggatgcagcgatcatcgaggaggaactagatgagctccgacggtactgccaggaggtcttcgggcgtgtggaaagataccataagaaactgatccgcctgcctgtatgtaacattgattttcttagttgtcattaaatctaaagagaataagtcgtgtgggattgggttgtattgatagtgggtgagagctcagactctggagctggagcacctgagttcaagtcctagctttgtcctacattgtcgctgtcaccttcggcaagctactcacttcacccttcttgcctcagcttcctcaaaagtgaaagtggtttagtagcagtaactaccctgtacaaaggattgttttgagcattagatgagttaatgtatacaaagagtttagaagaacatttggctcatatcttctatggaagataaataagaatcttttgatcgcagaaacatggggcagcactgctctagagaagcctctagaagaaataagagaagcctctagaagaaatacaataaaaggaagcaaagtgaacagcttcttaattgatgaggttaggtttaggtgaattttcattcttccgttttcctaattgctaccataatcacatcttacttatagagatgttattagagtatttggaatcttctacgatcaaacctattttatatctgggctataaggacaagctaaggtcttagtaatttgctcttatttccgatccttgccagtgtgtaggtgttgtgtggtgggcatggtagtagattgcctttctttataatatttatttaatcttatattaattatttgaagtatgttttaatgttattcccattttaccaacaatgaaactgaggcttatgtaggataatttataagactttttaattttttcccactcaaaaaaaaaaaaccctgtgggatgcctgggactgttattcccattttatagatgagaaaactgaggcccagaggaattaagttccttatccaagcttaaacaggaagcacacagcgtaactgagatttcaacccagacagtcaaactctagagcagcactgtcccctgtatttctgtgatcagaagattcttatttatttgctcataagaagttaaaaattgtccccacatggtaggcaggtggcccagataagaagctagtctgaccactacagtgacagggttgccttgacttcccttctagctcccagacgatgagcacgacctctcagacagggagctggagctggaagactctgcagctctgtcggacctgcactggcacgaccgctctgcagacagcctgctttctccacagccttcctccaatctctccctctcgctcgctcagcccctccggagcgagcggtcaggacgagacaccccggctagtgtggactccatccccctggagtgggatcacgactatgacctcagtcgggacctggagtctgcaatgtccagagctctgccctctgaggatgaagaaggtcaggatgacaaagatttctacctccggggagctgttggcttatcaggtaggaaagagcctctccagtttgccagcttaaaggaaagtcagagggaattaatattgccctggaaacatgacagctatccagaatcatttgcttccttctttcatgcggggaaattgtacctaagtgaacacttagatatgaatgtgattataaaatgcaaaatttggtgtggccgttgatttattccacgtagatttgtggtagtaggtgacaagcgctttgccaggttctagggatacacagttcctcttcttctcccagagcttccactctagtgtgggacacagtgagaaaccactgtatgaagtgtttggggctcagatggcagtgtggtggcaggacacacaagcaggggcgacaaagccggagtcctgggagagacttcgggaaagaaaccatggagcagagtccagagggtgaatcgcagttggtcaggtgggctcggaagtgcttagaggaagaaaggaggggaagcctccctgctttgtgattggcctggtgcttttgatcattggcagtttgtctggaatgacaggcatggaatggacaaagtggagaagagcctggctgtgaagcagcctgttcaccatggaaaagagctgtggctcctatcctgaaggtcgtggagccacagcaggatctgcggagggaggtgctgggatcctccctcctcagggatgtgcagattttcatattgtatctttctggataccacagggagaagggcatattcagcggagagagtccaaatgaaaccttttacaacctcagacagaagtagggtggtggcctgaactaggggaagcagaattgggaatggggagaatgggaatgatgtgagaaatcacacagagaagactcctccagaactctcagtccattgaactgggatggaggcgattttctgggctgggcatcttggtgaaagatgcaggtggtcctaggccctgaggaccacaagagggaaggagcactgtgggtgcaggtgggcaagggaggtggggctgtgagagcagggaggggatgagtttgcttgtgtgcatcctgatcttgagatacctgcagaatatccaaatgcaaaagtccagtcgtagatgcacggtgtgaagtgcagaagccagaaatgcagattgggtaggtattcacatgtaaatggcaatggtcctggagtgaacggaggagctcccacaggaagagtgtgtgaaggaaaacaagaaggaccaccacccaagccacacatgcagtgaagggatggacagagaaacagaaactctgtaaggaaggtgaataaaaatagaataaagagttggaggctgatttgtggcacttggaaatgtatctcatacattctgtcaaaggacatctggggaatttctgtttggttctggtggttcacatcagattcccaagggatgacactgttctaaaaagaaaatgatttctctcatttctattttgtctttacagtaaggcctattagtcaggcatatggcatctgaagcagagctgtccaaaaccagccactggccagttgggactgttgagctctgagatgggactgtgcaaattgagatgggttgtgcgtggaaaacatgcttacatgaatttcaaagacttagtacaagaaagaaaataaaatattaataattatattgattacatgttataatccctgtctaatgtagtgttaaaattaattttataagtttctttttacatttctaatgtggctatgaaacctttaagattacatatatagttcacatagaaatatatgggacagcgctgctctggagtctgggctgaaatctcagttctgccatgtactttctgtttaaacttagataaggaacctaattcctctgtgcctcagttttctcatctataaaatgggaataacattcccaggtaccctatagggtttctatgtgataaatttgtgctcagaccagagcctggctcataaaaacactctcagtcactgtgagttcttttttttttttttttttttttttttgagacgaagtctagttctgttgcccaggctggagtgcagtggcacaatctcggctcactgcaacctccacctcccgggttcaagcgatcctcctgcctcagactcccatgtagctgggattacaggtacctgtcaccacacctggctaatttttgtatttttagtagagatggggttccaccatgtcggccaggctggtctcgaattcctgacctcaggtgatccacccgccttggcctcccaaagtgctgggattacaggcgtgagccaccatgccccacccactgtgaattcttatgattcatttcaggaaagctttggtgagcctgcacgctcctctgtgcgctcaggagctatgtgtctagaataactgacttcctttttttcccctaggaaagttattttcctgcacaagggattcagggtttccagaacttagctgtcaacttagactgtgctttttttgcagatgtaatgatccccgaaagccctgaggcctatgtaaaactcacagaaaatgcaatcaaaaatacctccggtaggcacaacaagccggagccagcctccctccctcccctgtatagcaatcctcctctcttagcacatctgctgtctctctcccagctttgtggctctagcatgttaaggcacagccttcctctcttactgctgtactagaaaaaacagctggttaaatccacaccaagaataagatttcactaattgagcgaaataaagtaacttctcaacttgttaaatggtgattggtctcattaggtatagacctctcatgtccattaactgcagaaaatatgagaaggaaaacccagtcatcagcctctgcgccctagtgttctacgtggtgtggtaatttcagcttcactgcatgcagacctacctgtggctggagactcagggtgcaggctctggtcccaagtccgccagcctgcatgagtgacctttggcccatccaccactttatcctcctcatctcaagaatcccgtatgagacaaggggtgagatcagatttcagctctaaaaaatatatgtaattttaatttaagaggtcgtaaaagataatttgaaatgaaaaatgtatttcacggtatgctgagccatagataagaacagaactattcctgaaacaagaagaattaaagaaagaaaaatggaactagttttgcttagtgttgtgttagacaaactgtagtgcaggagttcaggatcagtgatgtgggatgtcggcggggaatagagtttgaacgcagtgatatgatattgaatcacggagttactagtttacgcttcagtttttgaagaaaatcaaaaggacagaaagcaaagtaacattactgagagggtgattcccagggagggacctctcctaggtgtatctagaaggccttttttagaaacaaataaaaacatttaataaagcttactaatatttgttctgctttcaccccatgctagcttcactgatgatcaaatgttcctgtgtagttcgaagactttgacacacacacacacacacacacacactctcagtaattttacaaagaaatgttacaactttgagaggagaatgagccagaattctaggctatgagtaagaacctgcctagatggaaatgttaaaatcttagctttctcctggttttgtttcagatcttagataaaaagcaagtcgttgctagtttgatatctctgtatatatctattctgaggcactcttttcttgattaatgaatttatgccttcagtaaatgatgcagcaacctgagccttccgtgacactatcttcccctgaggtgcatgaagaaaaatcagagggaggatcttcccctgctcactaagcgatagcagaaagaacatgagaaaaagaacagctttctccttactgagatgcagtagacaccattgcagatttttagaaaggccttccacactgacaacattcagatgatcaggggttcagctggaagagggtcaggtgcacgaagctgttcaaaacggactggagagccgttttgcgacgtccgatctgctagggctctcagtcaagcaccttcattggtttggccattttaatgtctaacccaccggcacgatggtactaaatttgctttgtaattacccacacctgccatttctatgctgctgtaactgaaatcatttctgaaacttctccttgaatatcaagctttaaataagtcaaatagtttgtccagtaaagattcttatggttgccaccgcaggggaccacagtgccctagagtcacagatccgacaactgggcaaagccctggatgatagccgctttcagatacagcaaaccgaaaatatcattcgcagcaaaactcccacggggccggagctagacaccagctacaaaggctacgtaagtatcctggccatcctgattccgacctgtgcgaaaccacagttctgtgtcaaagaacagttcgtctgcagcatcagggctttatgtggtctctgaataccatgctgcccttgaactcgtgaacctggatgtgcaaagccaagccctgttattaagttaccatttgagtagaacttgtctgtttttaggcccacaaaactgttgtaatgacaaacctgttcctttacactgagcacttagggagatccttttcattgagagcaacaaaatactttggctcccaaaagtcattaggcatttttccaaattcaactaataatttttggaccaaggttatccttggagcagcagattttagctaatagattactaacatgcagtttttttggtagttcttttcctgggttcaccgaatgaccttgggaatgtttttctcttctgttttttagtgtgctcattctgaagaaaacagttctagcaagagggatttggggaaaagatagcaaggcattggatatactaccagttctatctatgcggctattggctatgtatgataaagtctagcagagggttatttgccctactcgagttactgaccagttaattttccctagagaactacctgctttcctacgcgtacttaaggaagagaattttaaagccagtctcttctctgcctcacgtcttctttcatatccaaaagactggttagtacaaggaaagaaaaatgaatttccccaagtctggtcacaactcacatgttctactctttgaaattaggaaagaaaactgttctagctatatatgttgattttattatccttataattacagaagagcggtcaattatgagtttgtttcctgttcagtttggcctattataccaacttctattatagtgaaaccactttttaaaaatacctatgatatagttttatggtaatcatactgacatcactgggattacacttaacctcaatcaaaagtaatcagaataacagtcctactggcattgtgatttgttaaaggatttatggtaagcacagcaggagtatcttgaaatgatttgttcttttaatctttgaatactgtatgtgatattaaaaatgaatttggaagcttttctttgactttagaatttagtcccttgatgcctattaaacattgcttacattttttttataaaacagctggctttaatattgctctataattttaagtattttaattatttaatgcaagaaagttcccatgagatttgtcgtaacattaacgttcccacatttcaatttaagaaagagaaagagggagcagcttgccaaaaattatatactgcattgccagctgagggctccgagttttaaattgcagattggtttaatctgttttgagtcatgaatcgtaaagaaacttgaaggacttctcgtgcaaaatcatgtatgcaaagtatatctttaaggcattgttttttgtatatgtgaatgtatcacctgtttaaaaggcatgtttttgaactttgcttatttaattttttttttttaagagacagggtctcacactctgtcacccaggcttgagtgcggtgtcatggtcttagctcgctgcatgcagctgaattcctgggctcaagcaaccttctcaccttagtgccctgaacagctgagactacaggtgctcaccaccacgcctggctcatttttaaaatattttatagagacagggtcttgctatgttgcccaggctggtctcaaactcctaggctcaactgatcctcccacctcggcccccaaagtgctgggattagaggcaggagccaccgtgcccagcctacctctgcttattttttcttttttcttttttttgagactgggtctcactctgtcgcataggctggagtgcagtaacacaattatggttcactgtagcctccaccctctgagctcaggtgatccacctcagcctcccaggtagctgagactacagatgcatgccaccatgcccagctaaatttcttgtatattttgtagagacagagttttgccatgttccccagcctggtctcaaactcctgagttcaaacaatccatcttcctcggcctcccaaagtgctgggatcacaggcctgagacaccacactcggccatcttggcttatttttagcagggtggcacagaggagccaaacacagacacttctcttgctgagaaattacaaagagattttccccggaagcttttgcactcatgaagatttgggtgacaggggccggttgtttatgtctaaacagatgaaactgctgggcgaatgcagtagcagtatagactccgtgaagagactggagcacaaactgaaggaggaagaggagagccttcctggctttgttaacctgcatagtaccgaaacccaaacggctggtgagtgcgtagcatccagttcaagagtgaatgaaatagaagatcctgaagcactttgttaacagcgaaattccacttagggggcttggccttcttctacaccgttctatcctgagaacttccttccaagttataacagtctccttttttgttgtttgtttgttttttgaggcggagtggcgctctgtcgcccaggctggagtgcagtggcgctatctcggctcactgcaagttccgcctcccaggttcatggcattctcccgcctcagcctcccgagtagctgggactacaggcgcccgccaccacgcccagctaaatttttttgtatttttagtagaggtggggtttcaccgtgttagccaggatggtctccatctcctgacctcgtgatccacccgcctcggcctcccaaagtgctgggattacaggcgtgagccaccacacctggccaacagtctcctttgacagtgaggggatgatgcatgccatcatggtagtgtttgcccatgtttcatttattattattatttttaatattgagatgaagtctcgctgtgttgcccaaactagactccaactcctgggctcaagtaatcctcccgcctcccctcgagtagctgggattacaggcgcgcactaccaccccagctctcatgttccaattattttaatgcactgtttctcacatatctaatcaggcattttatatgtgtgtgctcagagccctattgtagacaggatccaagaattgaacgatcgttcgtgctcatgactgcttattacttcgtaaagctctttacagtgtgaatgcccatgtaactaacttttttgcttcattattattagaaatacaaatagaaaaaacacagccattgtacccatgtaactgttatttccagatgacaacaacgaaaatgcccagtggaattacttttctttctgttgctatttaaaattggctgccaacctatgtttaaagcatttcataaacatcacatgtagaggaaaataacctcactgttctatgcatgtcttgccaggtgtgattgaccgatgggagcttctccaggcccaggcattgagcaaggagttgaggatgaagcagaacctccagaagtggcagcagtttaactcagacttgaacagcatctgggcctggctgggggacacggaggaggagttggaacagctccagcgtctggaactcagcactgacatccagaccatcgagctccagatcaaaaagctcaaggtagctgccccttgcctttcccacggcggacaaacagagagccaccgcgtgaacgaccgtgcagatggcacctctagttcgagctgctcttacacagcagcagaaaagggatctaacaaaaatgagtgagaatgctctcctcacctccagccatcccaaattcctgtattccacaaagatggttttcttttttttcttttctttctttctttctttctttctttctttctttctttctttccttctttctttctttctttctttctttctttctttctttctttctttttctttctttctttttctttcttttctttttctctttctttttctttctttctctctcattccttccttccttcttttttttctttctttctccttctttccttccttccttcctctctcccccctccctcccttccttccttcctttcttttttttttttttgatggagtctcactccgttgcccaggctggagtgcagtggcatgatctcagctcagtgcaacctctgcctcccaggtttaagccatcctcctgcctcagccccactagtagctgggattacaggcacgcaccaccatgcctggctagtttttgtatttttagtagagatggggttttgccgtgttgcccaggctggtctcgaactcctaaccccaggtgatccacccacctcagcctcccaaagtgttgggattacaggcatgagccaccgtgcccggccacaaagatggttttcaagggcagaaaaggggaccatattgtagaactatccaccatgtaaataagcacacacgatttaatgaattgatattttaagaaatgtccaattaaaatttcatgaagcatccaggtacttctgggacctacaagaactctttgtaagggaaatacagaatgacctggctcctacaggcctatatctagagctggagagaaatcctctccaaaattgtatctgcatgaatttgtgggggacataatgaagttatttgacctcaagtaagtgaaacttctgaaattgattacagtagtggtagaagcaatttttgctgtaataaataaaactatagagtaattgtggtgaaacacctggcatttgcgtttgattttggcttggcccgcatggatatagtacaccttaactccagctctagatcttaaaatcctccttaacccagacactaaaatgctttaatatatggagactattgtgagcatctcatgaactgagagctcagtttctttttaaaacccatcagtgcttgttttttcctgtttggacagtattaagatgtgctcctcctcaaaatgtggccacctaggctctccggggtcaggataaggaatgaagtgtgtgctgcttttgtgtttctgtggttttagtatatgctttttatttggggttgatgttttttggcttgcttttagtgattgtgtgattttgttttattttatttatttatttatttatttatttatttatttatttatttatttttgagacagagtctcactctatcacccaggctagagtgcagtggtgcgatcttggctcactgtaacctccgtctcctgggttcaagcgtttctcctgcctcggcctcctgagtagctgggactacaggcatgcaccaccatgcccggctatttattgtatttttagtagagacagggttttgccatgttggccaggctggtctcgaattcctgacctcaagtgatccgcccgcctcggcctcccaaattgctgggattacaagcatgagccattgcgcctggtctgttttaaattttcaaacagaaaacttcaaacaagagaaatgaatctcccctccaggtgatccaaaaggtgcatccctatagaaaggcctctacactaccccatgaatttcaggacaaagtaccacgtgagagagatttacaatggctgcattatgaaatgcatttttatctagagtccctaaattactctagtaaggccatgttgcattataaccagattccttaaaaagttgatgaagcaaatgctggccagggtctgagacctcagagagattagggtagggaaataagaccttgaaagtcatccggcatgacaagaaaaaagacatcctcctttgtactttctcctgatgcttcctgtctgtattttctctgaataaatctgtggaataatcaagtattttccacagtgtctcttaaacccatgttgtctgtgtggttgaatctattctacagtatgttaagaacctattgaaaagtgcaaaatcaagacagattgggaacattgcagggctagtgagaaatgatttcaaaatgcagcctaggtcaatgtgacttccaggatctctcaccctaactggattgggggattttaaacagtacctagatactcaattactaatacagactcctgtgctcaagttcttggaattgagcactgggtgttttggaaatgcacaaagccaaaaatcagtcacctggtttttgtgaaatcaaacctaactggttagctcatgaaatacccaattcattctctctaccttcacatcagtgtggcacaggcagtattctcagcctgtgggccactgagcctgcagactcagtacatctggatcccagggccctggcatctgttttctttgcttcatttttaggcccacaaatttgaattttgttgtggttgaacctctgtacagagtgtggactcaatcatactccttaatgaggtcattgcctagcgttattgttgcctcctacaagactcctctttattcctcccccctgcaccccctaccctggctgaactctaagttcccatttgattttcaaaatggtagctattctgaaatatgtggcagaccttctttgttcagatatattctttaaaaatgtggatttgtgtgtgtgaatgtattgaggctgttgtgttccatgtaacattctgtttctgacgttttcactctacaccctgttttcttaagattcatccatgttgttaagtactcatctaattcatttcttccaactgccatacagttctcagtggtacgcaccctctgtcttttacctagccatcctgttaaggccagtttaaattaatggatcttttcattcatgtgaaacattttcaagggaaaatatctttgtcattattgtccttgtttgattgtcttttttgttcttttcaggagctccagaaagctgtggaccaccgcaaagccatcatcctctccatcaatctctgcagccctgagttcacccaggctgacagcaaggagagccgggacctgcaggatcgcttgtcgcagatgaatgggcgctgggaccgagtgtgctctctgctggaggagtggcggggcctgctgcaggatgccctgatgcagtgccaggtctgtagagctttgggcaggaggtgactcagagagagacattagcaatttagctgagtgtgtgacttgatgtatcatggtttctagagggacgcagttgctccccaaagtcagtatttcagtgagataaccttgtgcccaaacttttcattttactggagcatttctacatgttcatgatcatgttcaaaatctctaggtcctatcttctgtccagataagaagagactattcctcatgtttatctccgtcgcaacgctccttctatgactcattcatttatttcctttatttattcaacagatatttactgggcaagtaggcagacccttcttgaacatcaaagtgagcattgcaaatatttgtttttccattcatactgtaattacttgctgggcgtccaccatatggcagacgtggtgctaaaacattgaatacagcatggcctctgcttttgttggggaagacaagatcaataaaatgcaagcaaatagttaaaccagatacttgcagacgtggatgataaaagtaactgagaaaagccactttgagagggtagtcagggaatttatttggctctttgagctaacattggaaggatgttgctatgaaggtaatataataaatggaaagtcccagaagcaggaaaggacttagtgtctttaggaacagaaaacaggccattgtgaccagagtgtagtcggtgagctgagccagggagtgataagaaagactgaggaggtggtcaggaaccagatggctttgtaggtccaggccaggagattggatcatattctgagcgccatggaaagccctggaaggagttgaagcctgctctccaggtttatatgtgccccaagagtaatataatagttccttgaaagcgggtacctaaactgctgtttcacctctgcacccactcctagtacagtgccttatctgtaggagatctttagtaactgtatgttgaataaataaatggatgaatgaatgagtgaataaatgaatgaatgaaggggatatgagattcagcctaggtgggccttaaaatatggaaagatttgactacacagagaagagagggcagcagagttgcttccttccaaactgtataatagcactacccttttttcagaaataacgtatgttgatgccagttttcctttcgtctaaattgtcctccaagtaataaattagatgcttttggtaagaacgtgaactcacgatcaggtcattacaacagcaccagtgccttcctcagaaaggagttgcatgtacgttcttaaaaccaagtatgtttgctaatggtggcagttgaaagacatttaagttttgagagaaataaaaatattttatttacagttactttaaactgttttctgtagggtttccatgaaatgagccatggtttgcttcttatgctggagaacattgacagaaggaaaaatgaaattgtccctattgattctaaccttgatgcagagatacttcaggaccatcacaaacagcttatggtaagatgtgtgaactctggcagcctccagttatttttagcagggttgcatttcatttacagaaaatgaatataagtggtaagtgttgtttctttttttttaactttttgcattatagtctctactttacacttttttaactccctgtggtttccaatctttgtaaagcaaacatgtgcatagaagatgatatctgctagctttagaatctgattctaaagttgttgctcagttgtaaaaatcttagtgttctcaagcaatcttaattagcttgtgttgtttattaaggcagcttaatttaaacttcatgttacatctatggcccaaaagtatatttggtggcttgtagtaaaaggtcattaaaatattagaatagaatgagacaattaagtcttttgtttgtttttgttgtcgttgttttttgagacagagtctcactctgttgcccagggtggagtgcagtggtgcgatctcggctcactgcaatctccgcctccgggattcgagcaattctcctgccaattctcctgcctcaccctcccgagtaggtgggactacaggtgtaagccaccacgcctcgctaatgtttgtatttttagtagagacagggtttcaccatgttggccaggctggtctcgaactcctggccgcaggtgatccacctgcctcagcctcccaaagtgctgggattacaggcatgagccaccacacccagccgagtctttcaaagaggaattaaatacatcagattaaacatgaacctgagcatcaagttttctgaaagccaagacaaaatgggaaacaaggagtaaacttactttcattatctggcaaaaacaaaacataccacttctcaaggaaggagaaactttttctagcactaaattcaagaggaaattaactggtagactcttatacaaggatctttggacaatataatgtacagtatatttaagtgactttatagaagataaggaagcatatttgagttccattagaagaaaatattatgcactttgtagctctctgtatttttaaaatgttatgtcttaacatttaacactcacctaaactacagaattggtaccttttaattcagtaccataatagtcttagaaacctagaggaaatagctgtggaactgcatttttacttcactttgacctctggcatcaagctgtgaatgacgaatcacccctttttttttttcaaatcttgactagatatcagaggatacctagacatacttctgcttcgctatatttaatgttgtgcttttctgtttaaaagattatcttacatctcacttgcatactaatctatattttaattactgtcatatatacattaactaatttgaaccttccaataatactgtggaccaggcatcaaatcaaactgagatcagagacggtcaggggtcttatagaatatttttggcagaggcaggattagaactcaggccgtgagctgctgcatcctttagtgtgtgagctccacgtttgatgctcaggtataatttcccaccaagttaagttgattgcattctgcacttttggagcttttgccaattatcaaaaatgcttagaaaaattaatttgtttttgtatgcatagcaaataaagcatgagctgttggaatcccaactcagagtagcctctttgcaagacatgtcttgccaactactggtgaatgctgaaggaacagactgtttagaagccaaagaaaaagtccatgttattggaaatcggctcaaacttctcttgaaggaggtcagtcgtcatatcaaggaactggagaagttattagacgtgtcaagtagtcagcaggtaagcaataaacagacatcatcgtgtagcatttcttactggagaccaaagaagcatcatcttcatgcattttagaaagactttaaatatagtacttgtcagaatggagtgtctcctttcagccactgctcttacaagtcctgtctcaaaataaaaaagcagccacataaacttttacaacaggacactgcttttgattctgttaaatccaaaagctctcttgttgttgctactaatgctattaccacaactgctgtggcattttatttcaccctgtttaagaatttacacactttaattacacagccatggtagagcaaaccaattgttgtatctgagttttgtatttaaccactctcaggcatgaattctccattatgtatacagaaaaaaaaaaaaaaattaaaaaacagtcctctgctcatttaattttttatatttttttttctacaatcaactccattgtggtattattggttttgagaaatgcatttgcaggtgagatgtggtgatgcctggtaagatttcaaccattctgctgtgaaatcctgccatgaacacatgctttgccctgctgtaagcatgcaaaagaacaatctactctgaatagcagcagtgtctgaaatagtaaagtcctctaatgcaaaaaggcagactcctagatgactatcttttgtttccaactggaatgtattgacttctgttcagcctgagtgaccagcaggctctacagcaggtgtcttcccctcccaagccaatatcaattcattcatatccatgtctccaagaaataataaagctataagtgaaacatagcaataacaaaatcatagctatattttccagaatgggcaaacggacagctaggaaatcccaacacactagaagaatttggccctattcttgtacctgtctggttccattttccccaaggaatggtttgatttttatggtggagacatgggggtggatggagatggagtgggagataacgtggtgcaacagagggcccccatgggtctgggacatggagttgttaaaagaatctttctcccacataggatttgtcttcctggtcttctgctgatgaactggacacctcagggtctgtgagtcccacatcaggaaggagcaccccaaacagacagaaaacggtaactttccactggtcgttttcagttggcccatgggagtgaacactgggaagtgacagtatttgcacccaccacagggttcacaggcaggcgtcccctccagaggagggctgtcacacagggtagcgcgcttcctcagccctgccacatcccctcccagcatgcgctcaggaatggaaaagagcgattctggttttcaaaagaatcaggactcaacgtgtggctggtatgcagggagaacatttatttttcttgctcaaataagaaaatttccagaatggtgcccatttgtccctttggtggctcctttcttcaagccatggctgccacgactatcttaaaaggtaggcctccacttgcggggcgcctcggctggaggtgcacagaaccgtgaacgcctgtgagccattgactcgttaaggcaagtggaggttctgttgactctcaagctaagccgcttctgggtggtggtcctgaaggtttgcggcagttgtgccacccctaaaatggcaacaactcacccacaggccttggcgggggctgcctcactgaacacaaagaggatgaaaggacaaattcggcccctgctaccctctatgccttgatttctctgtgtaattagaagcttgttttttgttttgttatatattttttgtccagctttatgattatattcattccatttttccttagtttttagaagttttgatttcatttgacttttttgttataaacatttatgttctatgctgataaatgtattatcttttttaggatttttttttttttttactacattcactagtttcctatagatcctagtttaagaatgtgaaggaatactggcttttcaagtcaaattttaacctttctttaagttgaatatttaagttgggcttcatcactacaaagaccaatctcatattgccattgttatttcttatgggccaagaattttaacactgttttactattctaaaagatgaaaaaaaatatattaagtgtctttgaaatatgtgatatggcatagtgcattttacatttattgtatgtaaatatacacatgtgtttctaccatgaaaagccatgagaattatgcccaccatagtatggactccagaatcccaacttaatgttttatcagtggctaatcacatagatataaatttattttacttcttcaacaaaagaaaagccagtttccttaattcatgggtactgatcatttcatttgatttatttttcctttgctgcacttttagtttaattttcattagtagcttgtctttatttgcctggactgaacattcttctttctttaccccctgttcattgcaaacagccacgaggcaagtgtagtctctcacagcctggaccctctgtcagcagtccacatagcaggtacctccttctcctggtttccacactgttctagaaccccaagaggatgatgaaaattgtccatgacttaggttgacctatatctggtctgcctcagggtagttgggaaattactcatttcagtccacaccctttcctcatacattggaagagaagtttctgaatgaaatgttcaagtaaatttcagagcataaaatatttggactccgtgaaaattctgtttgtctcaacatagcccatctggtacttttcatcaaattgtcaataaggatttgattacaattggtggcaccactgccatttgattcatggcagacttttatcatcctctttatttctagagtttacaataagacaggtaatcgatcagtgaattcttttaccattcacaaaacccgcatatctgaataaaatatactaacatccccaactttttattttattttcatgttttatccagattgtgggttttggagtctcaaaatggcaagtcctaatttggtgttcattggaaatttataagtaccttctctcttctgcttatcctaaaacttcccttcatccagcacacccagccactcactttccgggcacttggcaagctcactctggaacccgcagcagccagtgcccctgcccagtcacctcccgagagccgactcacagctgccactccgcgcttcctgcctggcctccagcagcccctcactcccgcagttagcagtgctttgccttctttgttgtcggtgtggtgtctgtgctcctctgctcctccactgatcagttcaagtttccccagacagctttctaaaaaatgaaaacactgtcctcggagcctgttttcattccagtccctagcaattcactgttaaagtagcttgtccctctggaaacttatcaccactgagcaggaatctgaattcctggaaggagggtggggatgaggaaatgtagaactgtaaacaacccttgagtaataattttagttttccagctgtacataagggactggctatttcatttggtccttcccactcggctgaagtcaggcagaacgtattttcatatgttctctggttttagacctccctgtactgtttttttttttcttttcatttcctttggtttggtttgaagacaattttatgagttttttttttctagcctaaacaaaatagcaataataaagtatggagaaaaactcttggggacttttgaagataatgacgagcatccgcagatgctctaaggtttgctcagccccctataagtagagacagtttcttttaggcagatcattgtgttatatagtccatcttttccccacaaattgctgatgtaccatgaacagagatgaagaatatccccacagcattccttcgaagataccagagatcagttctttggttgatacaaatgatagtgacgagaagggggaaagcgcttatgttatgatgcaacgccaacagcagtcactctttggttcccaaatattgcgtctatctgctctccgcattgtttcagacagccacatagatcttttgaaaatgtcgaaggcatcgtttcttagggcagcaagtgcttcctcatgcctcctaacagggctttgcagctgggacagccacattctcactacgacactcgcaaggcgcctttcagctctgctctgtccagcacggttcattaacatctttctgagcattcagcacagtgttcactttgctactcaggtgggactggaacataaataatcttcacctgaatggcaaacgtcatccaacaccttcacagacaggttgtggttgaacattcttgggcttcgttaccgtcggtacctctgtttggggcacacccaaccccgagaatgaaaggcagagtctgctggggaagaatgaacttcacccacagtccaggctgtcgtggtgttcctttacattgagacttgagatatctcgtgtttaatcttgcactggtccagcaaattggaaaggttattgcagaagcataaatagtttagaatgttgtttccagcagtctgcaatgggaaatttttagatacgcattcttcctgagaggagaaagagactgagttggaagaaactgactattagtttgaagggaggagttactcatttggtttctttgttgttgtttaaagtcagatgttaatattatactagcctgttacatatttcaatttgatttgatggtggtgattctgtatcttcatacagtattttaaacctacatatgaattgatgccaataggtactgaacacctactaaatttaggccctgggcctacaaaattaattcaatgtgattcctaccattaaaagacttgcagtatatcagaatctagagattccctaaatcgttacagggagctccctagaacttcttaaaattagaaacataaaaatctgtgcatacattcataataaccatatttgtgactgttatttgaggttaaacacactttagaagcatgctttcaaagcaaatgcttatgatggtctagctggtactttttccctacgtttgacttaaaattttctaaccttatcgccattaattcttcaaaacactactgcaactgagttgaaattgacagctagaaagatttcactccaatttccagcaaggcaaaggaataattgcactgtagtccggatgtagcaaattgatgacttcattctaaagcttagaattgtaaaatgcaaaattgccttgggcaccttaggtctctggcaccttctttacagagaactaagatggaatgagaagtggcaaatgactggccgaaacactgaaagagggaaaaaagccctcatttaaaaatgtattcaagttaatcagatacatttaagcaagggcagtgggggttttttgcatgtacactagggcctcactataaacactactcagtttcttgtagaatttgttttgaagtcttttcattatctggggatctatttattcaaagcattcaaagagcctcagcacagagcctctcccctctaaggcagattgctcacccgtgccccaaggaaagctgtagggtaaggctccgataggtttctctgttgctatttgaggtaggccttcctggtgtttctagggaacaagacaggcagtttgagaaatttatcacatgcttgaaagcactattaataaatcaggtatgttttcccgagagaaaaggccgaatccagccaacccctaagggtatgagtcggcacacccttggtatcattatacagataatagtgataagctgctgacattcatttagtacttaatgtgtttcaattatttagtgcttaattgtatacatgctaagcattgtatgtgttttacctcatttaaccctcacaagaatcccatgacatggctatattcccaatttatagacaaggacactggggattagaggtgtaaagatgtaggatttgaacccaggtctcccctgactccagaccctaccccgttaaccgtaccactctgctgaagggccattgatgggtagaagcctttaaacaatggttttagagctgaggccaccacaggctgcctcaggtagtttaggattagcaagaatgtttggtttggaaaaaaagaagacctgggtcctaacttgattctggaaacttgtctcctgaaccatatatccaggaaacactgggtttcaaagacaagacacataagggcaggatcaagatcacggacaatctagatgtttctgcaaaataaatctgttacatactgccagtgttagccgaaaagtaacaaaataaattagaagtttcttctcatttggctttaaatgatgcatgcacgaaattaactcattttcatttccttgattataaacaattttcaaagtgagtcataccctatgtgcatggcattcagacttctcacaattgtgtgtcctacacactttcttttgaagggtgtgattttagccactactccctccctgccattctccttatcccgcaattgtctaggtattttgggacagagatgaagcaactcctgggcagctatttacctggaaatttgaaggagtgagggaagtgagaaaaataaataaaaatttacttgtagcaaataagcacgttttttgctggacagaactatctgatatatctgtattgatgatgttccttaaggaggctcacacatttaatttttcctatataaacacaatctaaactggcatccatgtatgtaataagaccagaggagaatgaccagtgggtagtcaacaagttgcctttgttctttcccttatgaaatttcccaagactctagaaacttaggtgatttttagcacagtagctaaatattaaaaataaccctttccctgggaccattagcttcttgatactaaaatcgctagaacaagttccccctgaagatgaggcagctttgggcatgttgaaactctggtaattaccccaaggggacaggcattttcccagtggatagttcggatattttcaagggcagccagctgcacggacggtcactgaatattgtgtgttctctctgtccccatctcagcccatgacttcttcctagcttggcgttcttcagcattagaagtcatgcacaaattaaattttaataaaaaatgctctgatgctgttaaatgtgccatgtccttcaacagactccaacataggagtccacattctgtaaatggtgacatttttatcaaaaatgggcaagtaaattagtctctccggccttcagttttctcatttgcaaagatgaggggtgcattaatatcctaaaattattttggctgtcatgatttatgattcaatggtttgccatttttctcaggagtgaacaggtcaatgggcagcccttgttttgatcttgatctttgacctaattgcacaaagaatttaacagttgacaaacaggagctattcagctctgtcagattgtactatcaattatatatgtaaatcttcccatcactaaagttcttaaatgtctcctaatgaaaattagtcaggtatttaataactaggaattgtgggagctctcttcagtcactctgttataactcatctagctacaggtgttgagtgttggttgccagggcatattttaaagtcaggggaaggatgttttgaagaaaatttgatccaaagtttgtgggtagctatcctatccttcttaagacactttaaggcaaaccattgaatcattgcaaatgagaaaactgaaggccagagagactaatttacttgcccatggtcatgtaactgcctcaaaacaaaatgtccccacgtccacacacggatttgatgatctgcaggatactgtgaggccttatgaccagaggctttagacacgaggaaaccacttgtttccaaatattttaggatgcaagttcaggattctcttctttgcttctacatgtgagatacctgtgaaatgaatacgacctgaattaccattaccattattcctatcaccaaccagcaaaacatttcacagcagagagtgcggtgggcagggattttggaagcctgagtccctgctaggcctcttcctttaactgtagaatctgaagcaagtcattcagcctgtctagagtctccaggttctggtagttaaaatcacagggttgaaatcttctgccactggctgtgtgagcttgagccagttatttcacttccctgagctttctttcacatcatctgtaaaatgaagttaataagtacacaccgcagaggactgctgtggggattaaatgacagaacccaacataaatgctcagagtgctgcctagcaattagaagagtaaacatgaactgtccttagctactcccctacaaaattaggagatgaactggatgctctctaaggccctgtctcaacatgaatattttatgctcaggtaactcaagaagtttctattttccttttccattaataaggtatatgacatacttcttttatgttctactatattttcacaaaatatacttttttttccctcagcttattaggaataactcattggtcttagcacaagggcagttaatcagtttgaccactagatggtgattgagctcttgtggcttcttgggagattatttatactgacaaatcagtagaagacaaaaacatcgaacagtaaactttaaagttagaagaccatctatgctaatttgaagaggttagtgaagaggttgacacctagagatgaagtgagttgttcaaggttacattaccctgccgttacttgtgtggatttcagaaaagaacatgcttccaatttaaaccagtgatttgatttttccttacaccacaagaagtgtatagaaacactgcgtgctgcctgtttcttggggtttctgcagaaccaatatctgtttttgagatagagtctcgctctgttgcccaggatggagtgcagtggtgttccgatcatggctcactgcagcctccgcctcccgggttcaagcgattctcctgcctcagcctcccaagtgactgggactacaggcacacgccaccaggcctgactaatttttgtatttttaccatgttggccaggctggcttgaactcctggcctcaagtgatccgccaacctcagcctcccaaagcgctgggattacaggcgggagccactgtgcccagccctctcccatttttctttgatggtttaataaaagagttttgaatactccctctgttcccttctaaggggattctatctgtttttaacatttattttcttaggtgtcactccgcttcccccaccgatattagggtagtctgtcttcagaaattaataggtaataggtgagctacaaacatagtgctttcttctggaccaaacctacagttaccaatacagctttcacacgctcatattatttcagtagcctcacatacaatgtccttatccttggtgatattaaaactcttaaggaatttatactagttgtgagggagtgtttcttttggctacatcttttatttttgttcattcaatgttgtatgggtctgagtgtacaccaaatgcctgtcgtaaacaacatttctttcttcatcttttctgctagtaaccaaaaaaaggtaatggctgttcacaaaaagaaaacagtagcacccaactcagaatctacttccagattctgtattttccaggcagtccttcttaagagttctgaaacctgtactcaatctctaatgcactgtttaaaaggaagataaaagtgaaatagaaaaacttgtcactttgagtgtagaaggggctgtaggatgacagtccatcctcctcagaaaatggtgtccattttccaaagtaatgacgtcagtgataggatcagcctagcatctacatcatacaacaccagtgttctgtagacagactccactgctattccttgttcgtacagctttggaacccgctaatgtcagggcctgatgctgattcagtgcaagatgaaaccagggtatgctctatgattaatgaagcttttatgggtctgtgcaaaatgacaaagactgtttttatttttgctgcatggattttggcatatccaggatggctagatgggatacttggtatgattctgacagcaactaattttgcttaacaatgttcatgatattcttaaaacaaaaatatgctgcatcaaatatctacattttaattattctggatctacttaattcatgctagtagaatgtgtatagagcagttattttcgttgatagaaaatgtttcaccacattaaggggtaaaaggagtagaatttgaacctaattacttacgtttagttgactgactaaatgtttatttcttgtcagtgcagtttccaacaacctcatttgatggtggggggtgacctgggcacactgtggaaggctggcagctgatcgccaggctggggtgtgcttggcatggccctttagcttccaggaaggtgcagaggcaaaaagcagcgtccctccgacactggagttatctgagtaatttatgtccattcttctctcaggtccacaaaaggtggctccgattcctccctttctgagccagggccaggtcggtccggccgcggcttcctgttcagagtcctccgagcagctcttccccttcagcttctcctgctcctcctcatcgggcttgcctgccttgtaccaatgtcagaggaagactacagctgtgccctctccaacaactttgcccggtcattccaccccatgctcagatacacgaatggccctcctccactctgaactaagcagatgccatctgcagaagtgctggtagcataaggaggatcgggtcataagcaatcccaaactaccaacaagaggaccttgatcttggcgaaagccctcggtgtggcagctttagccctcctccagatcacatgtgtgcaaattatggcttcagaggtggaagataaacagtgacgggggaacaaacagacaacaagaaggtttggaagaaatctggtttgagactctgaaccttagcactaaggagattgagtaaggacctccaaagttccccggactcatgaattctgggcccttggcccattctgtgcacagccaaggacttcagtagaccatctgggcagctttcccatggtgctgctccaaccatcagataaatgaccctcccaagcaccatgtcagtgtcgtacaatctaccaaccaaccagtgctgaagagattttagaaccttgtaacatacaatttttaagagcttatatggcagcttcctttttaccttgttttcctttggggcatgatgttttaacctttgctttagaagcacaagctgtaaatctaaaaggcacttttttttagaggtataaagaaaaactagatgtaataaataagatcatggaaggctttatgtgaaaaaagttgaatgttatagtaaaaaaaaaaagatatttatgtatgtacagtttgctaaagccaagttttgtttgtattgatttctttgcatttattatagatattataaaat

SEQ ID NO: 2489 - DNA, 3893 bp, Homo sapiens
aaggtaaagccactagagagaaactgaaagaaaacattcttaagataaattgaattgacattttctctctaaaatatgatttatagaccacagataggaattaagagtttcctgataattttggcttcatattattttaaaggattatcaagaggaaattgctattgctcaagagaacaaaatacagctccaacaaatgggagaacgacttgctaaagccagccatgaaagcaaagcatctgagattgaatacaagctgggaaaggtcaacgaccggtggcagcatctcctggacctcattgcagccagggtgaagaagctgaaggagaccctggtagccgtgcagcagcttgataagaacatgagcagcctgaggacctggctcgctcacatcgagtcagagctggccaagccaatagtctacgattcctgtaactcggaagaaatacagagaaagcttaatgagcagcaggagcttcagagagacatagagaagcacagtacaggtgttgcatctgtcctcaacctgtgtgaagtcctgctgcacgactgtgacgcctgtgccactgatgccgagtgtgactctatacagcaggctacgagaaacctggaccggcggtggagaaacatttgtgctatgtccatggaaaggaggctgaaaatcgaagagacgtggcgattgtggcagaaatttctggatgactattcacgttttgaagattggctgaagtcttcagaaaggacagctgcttttcccagctcttctggggtgatctatacagttgccaaggaagaactaaagaaatttgaggctttccagcgacaggtccacgagtgcctgacgcagctggaactgatcaacaagcagtaccgccgcctggccagggagaaccgcactgattcagcatgtagcctcaaacagatggttcacgaaggcaaccagagatgggacaacctgcaaaagcgtgtcacctccatcttgcgcagactcaagcattttattggccagcgtgaggagtttgagactgcgcgggacagcattctggtctggctcacagagatggatctgcagctcactaatattgaacatttttctgagtgtgatgttcaagctaaaataaagcaactcaaggccttccagcaggaaatttcactgaaccacaataagattgagcagataattgcccaaggagaacagctgatagaaaagagtgagcccttggatgcagcgatcatcgaggaggaactagatgagctccgacggtactgccaggaggtcttcgggcgtgtggaaagataccataagaaactgatccgcctgcctctcccagacgatgagcacgacctctcagacagggagctggagctggaagactctgcagctctgtcggacctgcactggcacgaccgctctgcagacagcctgctttctccacagccttcctccaatctctccctctcgctcgctcagcccctccggagcgagcggtcaggacgagacaccccggctagtgtggactccatccccctggagtgggatcacgactatgacctcagtcgggacctggagtctgcaatgtccagagctctgccctctgaggatgaagaaggtcaggatgacaaagatttctacctccggggagctgttggcttatcagatgtaatgatccccgaaagccctgaggcctatgtaaaactcacagaaaatgcaatcaaaaatacctccggggaccacagtgccctagagtcacagatccgacaactgggcaaagccctggatgatagccgctttcagatacagcaaaccgaaaatatcattcgcagcaaaactcccacggggccggagctagacaccagctacaaaggctacatgaaactgctgggcgaatgcagtagcagtatagactccgtgaagagactggagcacaaactgaaggaggaagaggagagccttcctggctttgttaacctgcatagtaccgaaacccaaacggctggtgtgattgaccgatgggagcttctccaggcccaggcattgagcaaggagttgaggatgaagcagaacctccagaagtggcagcagtttaactcagacttgaacagcatctgggcctggctgggggacacggaggaggagttggaacagctccagcgtctggaactcagcactgacatccagaccatcgagctccagatcaaaaagctcaaggagctccagaaagctgtggaccaccgcaaagccatcatcctctccatcaatctctgcagccctgagttcacccaggctgacagcaaggagagccgggacctgcaggatcgcttgtcgcagatgaatgggcgctgggaccgagtgtgctctctgctggaggagtggcggggcctgctgcaggatgccctgatgcagtgccagggtttccatgaaatgagccatggtttgcttcttatgctggagaacattgacagaaggaaaaatgaaattgtccctattgattctaaccttgatgcagagatacttcaggaccatcacaaacagcttatgcaaataaagcatgagctgttggaatcccaactcagagtagcctctttgcaagacatgtcttgccaactactggtgaatgctgaaggaacagactgtttagaagccaaagaaaaagtccatgttattggaaatcggctcaaacttctcttgaaggaggtcagtcgtcatatcaaggaactggagaagttattagacgtgtcaagtagtcagcaggatttgtcttcctggtcttctgctgatgaactggacacctcagggtctgtgagtcccacatcaggaaggagcaccccaaacagacagaaaacgccacgaggcaagtgtagtctctcacagcctggaccctctgtcagcagtccacatagcaggtccacaaaaggtggctccgattcctccctttctgagccagggccaggtcggtccggccgcggcttcctgttcagagtcctccgagcagctcttccccttcagcttctcctgctcctcctcatcgggcttgcctgccttgtaccaatgtcagaggaagactacagctgtgccctctccaacaactttgcccggtcattccaccccatgctcagatacacgaatggccctcctccactctgaactaagcagatgccatctgcagaagtgctggtagcataaggaggatcgggtcataagcaatcccaaactaccaacaagaggaccttgatcttggcgaaagccctcggtgtggcagctttagccctcctccagatcacatgtgtgcaaattatggcttcagaggtggaagataaacagtgacgggggaacaaacagacaacaagaaggtttggaagaaatctggtttgagactctgaaccttagcactaaggagattgagtaaggacctccaaagttccccggactcatgaattctgggcccttggcccattctgtgcacagccaaggacttcagtagaccatctgggcagctttcccatggtgctgctccaaccatcagataaatgaccctcccaagcaccatgtcagtgtcgtacaatctaccaaccaaccagtgctgaagagattttagaaccttgtaacatacaatttttaagagcttatatggcagcttcctttttaccttgttttcctttggggcatgatgttttaacctttgctttagaagcacaagctgtaaatctaaaaggcacttttttttagaggtataaagaaaaactagatgtaataaataagatcatggaaggctttatgtgaaaaaagttgaatgttatagtaaaaaaaaaaagatatttatgtatgtacagtttgctaaagccaagttttgtttgtattgatttctttgcatttattatagatattataaaat

SEQ ID NO: 2490 - protein, 978 aa, Homo sapiens
MGERLAKASHESKASEIEYKLGKVNDRWQHLLDLIAARVKKLKETLVAVQQLDKNMSSLRTWLAHIESELAKPIVYDSCNSEEIQRKLNEQQELQRDIEKHSTGVASVLNLCEVLLHDCDACATDAECDSIQQATRNLDRRWRNICAMSMERRLKIEETWRLWQKFLDDYSRFEDWLKSSTAAFPSSSGVIYTVAKEELKKFEAFQRQVHECLTQLELINKQYRRLARENRTDSACSLKQMVHEGNQRWDNLQKRVTSILRRLKHFIGQREEFETARDSILVWLTEMDLQLTNIEHFSECDVQAKIKQLKAFQQEISLNHNKIEQIIAQGEQLIEKSEPLDAAIIEEELDELRRYCQEVFGRVERYHKKLIRLPLPDDEHDLSDRELELEDSAALSDLHWHDRSADSLLSPQPSSNLSLSLAQPLRSSGRDTPASVDSIPLEWDHDYDLSRDLESAMSRALPSEDEEGQDDKDFYLRGAVGLSDVMIPESPEAYVKLTENAIKNTSGDHSALESQIRQLGKALDDSRFQIQQTENIIRSKTPTGPELDTSYKGYMKLLGECSSSIDSVKRLEHKLKEEEESLPGFVNLHSTETQTAGVIDRWELLQAQALSKELRMKQNLQKWQQFNSDLNSIWAWLGDTEEELEQLQRLELSTDIQTIELQIKKLKELQKAVDHRKAIILSINLCSPEFTQADSKESRDLQDRLSQMNGRWDRVCSLLEEWRGLLQDALMQCQGFHEMSHGLLLMLENIDRRKNEIVPIDSNLDAEILQDHHKQLMQIKHELLESQLRVASLQDMSCQLLVNAEGTDCLEAKEKVHVIGNRLKLLLKEVSRHIKELEKLLDVSSSQQDLSSWSSADELDTSGSVSPTSGRSTPNRQKTPRGKCSLSQPGPSVSSPHSRSTKGGSDSSLSEPGPGRSGRGFLFRVLRAALPLQLLLLLLIGLACLVPMSEEDYSCALSNNFARSFHPMLRYTNGPPPL

SEQ ID NO: 2491 - DNA, 14651 bp, Homo sapiens
gattttgttaagaaactacagagcaaacaggcatccgtgaacaccataatagaaaaggtgaataagttaacaaagaaggaggaatcgcctgaacacaaggaaataaatcatttaaatgatcagtggctcgatttgtgccgtcagtctaacaacctgtgcttgcaaagggaagaggatcttcagagaacaagagattaccatgactgtatgaatgttgttgaagtgttcctagaaaaatttactacagaatgggataacttggccagatctgatgcagagagtacagctgtccacctggaagctttgaaaaagttagcattggcattgcaggagagaaagtatgctattgaagatctgaaagatcaaaagcagaaaatgatagagcatctgaatttagatgacaaggagttagtcaaagaacagacgagtcatttagagcaacgttggtttcagcttgaggacctcattaaaaggaaaatccaagtgtcagtcaccaacttggaggagttaaatgtggtgcagtccagatttcaggagctaatggagtgggcagaagagcaacaacccaacatcgccgaggcccttaagcagagccctcctccagatatggctcagaaccttctcatggatcacctggccatctgcagtgaactggaggccaagcagatgctcctgaaatcgcttataaaggacgcagacagggtcatggcagatcttggtctcaatgagcgacaggtcatccagaaggctctctctgatgcacaaagccacgtgaattgtctcagtgacttagtgggccagcgaagaaagtacttaaacaaagccttgtccgagaaaacccagtttctcatggcagtgttccaggccaccagccaaattcagcaacatgagcgaaagataatgttccgtgaacacatctgtctgttaccagatgatgtgagcaaacaagtcaaaacatgtaagagtgcacaagccagcctcaagacttaccaaaatgaagtcactggactttgggcccagggtcgcgaactaatgaaggaagtcacagagcaggaaaagagtgaagtgctggggaagcttcaggaattgcagagtgtctatgacagtgttttacaaaagtgcagtcaccggttacaagaactagagaagaatttggtttctaggaagcattttaaggaagattttgataaagcttgccactggctaaaacaagcagatattgttacatttcctgaaatcaacctaatgaatgagagtactgagcttcatacacaactggctaaataccaaaacattcttgaacaatctccagaatatgaaaatcttctacttacgctgcagagaactgggcagaccatattaccatcgctgaatgaagtcgatcattcctacctcagtgaaaagctaaatgctttgcctcgacaatttaatgtaattgttgccttggctaaagacaagttctataaagtccaggaagcaattcttgctcggaaggaatatgcttccttgattgagttgacaacccagtctctgagtgaacttgaagcccaattcttgaggatgagcaaagttcccaccgacctggccgttgaggaggctctttctctgcaagatggttgcagagccattctggacgaggtggcgggccttggggaggcggtggatgaactgaaccagaaaaaagaaggttttcgcagcacaggtcagccttggcagccagacaagatgctgcaccttgtcaccttatatcacaggctgaagcgacaaacagaacagagggttagcttattagaagacaccaccagtgcttaccaagaacacgagaagatgtgccaacagctggagagacaactgaagtctgtaaaagaggagcagtccaaagtgaatgaggaaacgctgcctgcagaggagaagctcaaaatgtatcactccctggcaggaagtctccaggactcagggattgtactgaaacgagtaaccatacatcttgaagatcttgccccacaccttgaccccttggcttatgagaaagccaggcatcagatccagtcctggcaaggggagttaaaactgttgacttctgccattggtgagacggtgacagaatgtgagagccgaatggtgcagagtatagacttccagactgagatgagtcgctccctggactggctgaggagagtgaaggcagagctcagtgggccggtgtacctagacctcaacctgcaggacatccaagaggaaatcagaaaaatccaaattcatcaggaagaggtccagtccagcttgagaatcatgaatgcgctgagtcacaaggaaaaggagaagttcacaaaggccaaggagctgatttctgcggatttagaacacagcctcgctgagctctcagagctggatggagacatccaggaagccttacgcaccagacaggctaccttgactgaaatatatagccagtgtcaaaggtattatcaggtatttcaagcagccaatgactggcttgaggatgcccaagaattgttacagctggcaggcaatggcctagacgtggagagcgcagaggaaaatctcaaaagccacatggaatttttcagtacagaggatcagttccatagtaacctggaggagctccacagcctggtagccaccctggacccactcatcaagccaaccggcaaagaagacctagaacagaaagtggcttctctggaactcaggagccagaggatgagccgggactctggtgcccaagtggatctcttgcagagatgcacagctcaatggcacgattaccagaaagcaagggaagaggttattgaattgatgaatgatacagaaaagaaattgtctgagttttctttgttgaagacttcgtctagtcatgaagcggaagaaaaattgtcagaacacaaggctttagtgtcagtggttaactctttccatgagaaaattgtggcccttgaggaaaaagcttcacaactggagaaaaccggaaatgatgccagcaaagccaccctgagcaggtcaatgaccaccgtctggcagcgctggacacgccttcgagctgtggcccaggaccaggagaagatcctggaagatgcagtggatgagtggacgggctttaacaacaaggttaaaaaggccactgaaatgattgatcagctgcaagataagttacctggaagttcagcagagaaagcatcgaaagcagagctcttaactcttcttgaataccacgacacgttcgttctggagctggagcagcagcagtcggccttgggcatgctgcggcagcaaaccctgagcatgctccaggatggagccgccccaacccctggggaagagcctccgctcatgcaggaaatcaccgccatgcaagatcggtgcctgaacatgcaggagaaagtgaagactaatggaaagttggtgaagcaagagctgaaggaccgagaaatggtggagactcagatcaattctgtgaaatgttgggttcaggaaacgaaagaatatttagggaatccaacaatagaaatagatgctcaacttgaagaacttcagattctcctaacagaagccacaaatcaccgacagaacattgaaaaaatggcagaagaacagaaggagaagtacttaggtctttataccatattaccttctgaactctcccttcagttggctgaagtggcgttagatctaaagatccgagatcagatccaagacaaaataaaagaagttgagcagagcaaggccacgagccaggaactcagccggcaaattcagaagttagctaaagacctcacaactattctaactaagctgaaagcgaagacagataatgtagttcaagctaaaactgaccaaaaggtgctgggagaggaattagatggctgtaattcaaagttaatggaattagatgcagcagtacagaaattcttggaacagaatggccaactgggtaagccactggccaagaagataggaaaactgactgaacttcaccagcagaccattagacaagctgagaatcggctctccaagctcaatcaggcagcatcacatttagaagaatacaatgaaatgcttgaattaattttgaagtggattgaaaaagctaaagtcttggctcatggaactattgcatggaattctgcaagccagcttcgggaacaatatattttgcatcagaccctgctagaagaatccaaagaaattgacagtgagctggaagcaatgactgagaaattacagtacctcactagcgtgtactgtacagaaaaaatgtctcagcaagtggcagaactgggacgggagactgaggagttgcgacagatgatcaaaattcgtttgcagaacctccaagatgcagctaaggatatgaaaaaatttgaagcagagttgaaaaagttacaagctgccttggagcaagcccaggcaacactgacttctccagaagttggacgtctcagtctcaaggagcagctctctcatcggcagcatttgttgtctgagatggagtcactgaagccgaaggtgcaagcagtgcagctctgccagagtgccctccggatccccgaggatgtggttgccagcttacctctctgtcatgctgctctgcggctgcaggaagaggccagccggctgcagcacaccgccatccagcagtgtaacatcatgcaggcagctgtggtacaatatgaacaatatgagcaagaaatgaaacatctccagcaactgatagaaggagctcacagagagattgaggataaacctgttgccaccagtaacatacaggagctgcaggctcagatttctcggcatgaggagctggcgcagaaaattaagggctaccaggagcagatcgcttctttgaattccaagtgcaagatgctgacgatgaaagccaagcacgccaccatgctgctgacggtgaccgaggtcgaggggctggcggaagggacagaggacctggatggggagctcctccccacgccttcggcccacccctctgtggtcatgatgactgcaggtcgctgtcacactttgctgtcaccggtcactgaggagtctggggaggagggaaccaacagtgagatttcctctccacctgcctgtcgctccccttcacctgtggctaatacagatgcttctgttaaccaggacattgcatattaccaagccttgtctgctgagaggttgcagacagatgctgcaaaaattcaccccagcacatccgcatcccaggagttctatgaaccgggattggagccatccgctactgccaaactgggtgatttgcagcgttcttgggaaaccttaaagaatgtgatcagtgagaagcagcgcacactctatgaagctttggaacgccagcagaagtaccaggactccctccagtccatctctacgaagatggaggccattgagctgaaactcagtgagagcccagagcctggcaggagtccagaaagccagatggctgaacatcaggcattgatggatgagattctcatgctccaggatgaaatcaatgagctccagtcctctctcgcagaggagctggtatccgagtcttgtgaggccgaccctgcggagcagctggccttgcagtccacgctcactgtcttagccgagcgaatgtccaccatcaggatgaaagcctcggggaaacggcagcttttggaggagaagttgaatgatcagctggaggaacaaaggcaggaacaggccctgcagaggtatcgctgtgaagccgatgagctggacagctggctcttgagtaccaaggccactctggacactgcgctgagtccacccaaggagcccatggacatggaggcccagcttatggactgccagaatatgctggtggaaatagagcagaaggtggtggctttatcagaactgtcagtccacaatgagaacctgctgctggagggcaaagctcacaccaaggacgaggccgagcagctggctggaaagctgagaaggctcaaggggagcctgctggagctgcagagagccctgcatgataagcagctcaacatgcagggaacagcacaggagaaggaggagagcgatgttgacctaacagccacgcagagccccggcgtccaggaatggctggcccaagctcgcaccacatggacccagcagcggcagagcagtctccagcaacaaaaagagttagaacaggaattagccgagcagaagagtctccttcgctcagtagccagtcgtggagaggagattctaattcaacattcggcggcagagacctctggtgatgctggcgaaaaacctgatgtgttatcccaggagttggggatggaaggggagaaatcatccgctgaagaccagatgagaatgaaatgggaaagcctacatcaagaatttagtaccaagcagaaactactacagaatgttctggaacaggaacaagagcaagtgctttatagcaggccaaatcgactcttgtctggtgtgccactgtacaaaggggacgtgccaacccaagataaatctgcagttacatctttgctggatggactgaaccaagccttcgaggaggtttcatcccagagtggaggggcaaagaggcagagtatacacttggagcagaagttgtatgatggagtctcagccacctctacttggttggatgacgttgaagaacgtttatttgttgccacagcacttttaccagaagaaacagagacttgtctcttcaaccaagagattcttgccaaagacattaaggaaatgtctgaagaaatggataagaacaaaaacttgttttcccaagcttttccagagaatggtgataatcgagatgttattgaagatactttgggttgtcttttgggcaggttatccttgctagactcagtagtgaatcaacgatgtcatcagatgaaagaaagacttcagcaaatactaaatttccagaatgatctgaaagtgctgtttacatcactggctgacaacaaatacatcattctgcaaaaactggcaaatgtgtttgaacagcccgtagcagaacaaatagaggcaatacaacaggctgaagatggactcaaagaatttgatgcaggaatcattgaattaaagaggcgtggtgacaagctacaggtcgagcagccgtccatgcaagaactctccaagctccaggacatgtatgatgagctgatgatgatcattggctcccggaggagtggtctgaatcagaaccttacactcaagagtcagtatgagagggccctacaagatctggctgacctgctagaaactggtcaggagaagatggcaggagaccagaaaatcatcgtgtcttccaaagaggaaatccagcaactacttgacaaacataaggaatactttcagggcctggaatctcatatgatcttgactgaaacactcttcagaaagataatcagctttgcagtccaaaaggaaacccagttccatacagagctgatggctcaggcttctgctgtactgaaacgggctcacaagaggggtgtggagctggagtacattctagagacgtggtcccatctggatgaggaccagcaggagctcagcagacagctggaggtggtggaaagcagcatcccaagcgtgggtctggtggaggagaacgaggacaggcttattgaccgcataacactctaccagcatttaaaatctagccttaatgaataccagcccaaattatatcaagtattagatgatgggaaacgacttctgatatccatcagctgctcagatctagaaagccaactaaatcaacttggagagtgctggctaagtaacaccaataaaatgtctaaggaacttcacagactggaaacaatattgaaacactggaccagatatcaaagtgaatctgcagatctaattcactggttacaatctgcaaaagaccggctagaattttggactcagcaatctgtgacagtcccacaagagctggaaatggtccgtgatcatctaaatgctttcctggagttttctaaagaagtggatgcccaatcttccctgaaatcatctgttctgagtactggaaatcagctccttcgactaaaaaaggtggacacagccacgctgcgctctgagctgtcgcgcattgatagccagtggactgacctgctaaccaatatcccagccgtccaggagaagctccaccagctccagatggataaactgccttcccgccatgccatttctgaagtcatgagttggatttctctaatggaaaatgttattcagaaggatgaagataatattaaaaattccataggttacaaggcaattcatgaataccttcagaaatataagggttttaagatagacattaactgtaaacagctgacagtggattttgtgaaccagtccgtgctacaaatcagcagtcaggatgtggaaagtaagcgtagtgataagactgattttgctgagcaacttggagcaatgaataaaagttggcaaattctgcaaggtctagtaactgagaagatccagctgttggaaggcttattggaatcttggtcagaatatgaaaataatgtacaatgtctgaaaacatggtttgaaacccaggaaaagagactaaaacaacagcatcgaattggagatcaggcttctgttcaaaatgcactgaaagactgtcaggatctggaagatttgattaaagcaaaagaaaaagaagtagagaaaattgagcagaatggacttgctttgattcagaacaagaaagaagacgtctctagcattgtcatgagcacactgcgagagctcggccaaacctgggcaaatttagatcacatggttggacaattaaagatactgctgaaatcagtgcttgaccaatggagtagtcacaaagtggcctttgacaagataaacagttacctcatggaggccagatactctctttcccgattccgtctgctgactggctccttagaagctgtgcaagttcaggtggacaatcttcagaatctccaagatgatctggaaaaacaggaaaggagcttacagaaatttggctctatcaccaaccaattattaaaagagtgtcacccacccgtgacagaaactcttaccaatacactgaaagaagtcaacatgagatggaataacttgctggaagagattgctgagcagctacagtccagcaaggccctacttcagctttggcaaagatacaaggactactccaaacagtgtgcttcgacagttcagcagcaggaggatcgaaccaatgagctgttgaaggcagccacaaacaaggacattgccgatgatgaggttgccacatggattcaagattgcaacgacctcctcaaaggactgggcacagttaaagattccctctttgttctccatgagctgggagagcaactgaagcaacaagtggatgcttccgcagcatcagctattcaatcggatcaactctctttgagtcaacacttgtgtgccctggagcaagctctctgcaaacagcagacttcattacaggctggagttcttgattatgaaacctttgccaagagtttagaagctttggaggcctggatagtggaagctgaagaaatactacaagggcaggaccctagccactcatctgacctctccacaatccaggaaaggatggaagaacttaagggacagatgttaaaattcagcagcatggctccagatttagaccgtctaaatgagcttggatataggttacccttgaatgataaggaaatcaaaagaatgcagaatctgaaccgccattggtctctgatctcctctcagactacagaaagattcagcaagttgcagtcatttttgctacaacatcagactttcttggaaaaatgtgaaacatggatggaattcctagttcagacagaacaaaagttagcagtagagatttcaggaaattatcagcaccttttggaacagcagagagcacacgagttgtttcaagccgagatgttcagtcgtcagcagattttgcactcaatcattattgatgggcaacgtcttctagaacaaggtcaagttgatgacagggatgaattcaacctgaaattgacactcctcagtaatcaatggcagggagtgattcgcagggcccagcagaggcgggggatcattgacagccagattcgccagtggcagcgctatagggagatggcagaaaagcttcgtaaatggttggttgaagtgtcctacctccccatgagtggtctcggaagtgttcctataccactgcaacaagcaaggaccctctttgatgaagtgcagttcaaagaaaaagtgtttctgcggcaacaaggcagctacatcctgactgtggaggctggcaagcaactccttctctcggcggacagtggcgctgaggccgccttgcaggccgaactcgctgaaatccaagagaaatggaaatcagccagcatgcggctggaagaacagaagaaaaaactagccttcttgttgaaagactgggaaaaatgtgagaaaggaatagcagattccctggagaaactacgaactttcaaaaagaagctttcgcagtctctcccggatcaccatgaagagctccatgcagaacaaatgcgttgcaaggaattagaaaatgcagttgggagctggacagatgacttgacccagttgagcctgctgaaggacaccctctctgcctatatcagtgctgatgatatctccattcttaatgaacgcgtagagcttctgcaaaggcagtgggaagaactatgccaccagctctccttaaggcggcagcaaataggtgaaagattgaatgaatgggcagtcttcagtgaaaagaacaaggaactctgtgagtggttgactcaaatggaaagcaaagtttctcagaatggagacattctcattgaagaaatgatagagaagctcaagaaggattatcaagaggaaattgctattgctcaagagaacaaaatacagctccaacaaatgggagaacgacttgctaaagccagccatgaaagcaaagcatctgagattgaatacaagctgggaaaggtcaacgaccggtggcagcatctcctggacctcattgcagccagggtgaagaagctgaaggagaccctggtagccgtgcagcagcttgataagaacatgagcagcctgaggacctggctcgctcacatcgagtcagagctggccaagccaatagtctacgattcctgtaactcggaagaaatacagagaaagcttaatgagcagcaggagcttcagagagacatagagaagcacagtacaggtgttgcatctgtcctcaacctgtgtgaagtcctgctgcacgactgtgacgcctgtgccactgatgccgagtgtgactctatacagcaggctacgagaaacctggaccggcggtggagaaacatttgtgctatgtccatggaaaggaggctgaaaatcgaagagacgtggcgattgtggcagaaatttctggatgactattcacgttttgaagattggctgaagtcttcagaaaggacagctgcttttcccagctcttctggggtgatctatacagttgccaaggaagaactaaagaaatttgaggctttccagcgacaggtccacgagtgcctgacgcagctggaactgatcaacaagcagtaccgccgcctggccagggagaaccgcactgattcagcatgtagcctcaaacagatggttcacgaaggcaaccagagatgggacaacctgcaaaagcgtgtcacctccatcttgcgcagactcaagcattttattggccagcgtgaggagtttgagactgcgcgggacagcattctggtctggctcacagagatggatctgcagctcactaatattgaacatttttctgagtgtgatgttcaagctaaaataaagcaactcaaggccttccagcaggaaatttcactgaaccacaataagattgagcagataattgcccaaggagaacagctgatagaaaagagtgagcccttggatgcagcgatcatcgaggaggaactagatgagctccgacggtactgccaggaggtcttcgggcgtgtggaaagataccataagaaactgatccgcctgcctctcccagacgatgagcacgacctctcagacagggagctggagctggaagactctgcagctctgtcggacctgcactggcacgaccgctctgcagacagcctgctttctccacagccttcctccaatctctccctctcgctcgctcagcccctccggagcgagcggtcaggacgagacaccccggctagtgtggactccatccccctggagtgggatcacgactatgacctcagtcgggacctggagtctgcaatgtccagagctctgccctctgaggatgaagaaggtcaggatgacaaagatttctacctccggggagctgttggcttatcaggggaccacagtgccctagagtcacagatccgacaactgggcaaagccctggatgatagccgctttcagatacagcaaaccgaaaatatcattcgcagcaaaactcccacggggccggagctagacaccagctacaaaggctacatgaaactgctgggcgaatgcagtagcagtatagactccgtgaagagactggagcacaaactgaaggaggaagaggagagccttcctggctttgttaacctgcatagtaccgaaacccaaacggctggtgtgattgaccgatgggagcttctccaggcccaggcattgagcaaggagttgaggatgaagcagaacctccagaagtggcagcagtttaactcagacttgaacagcatctgggcctggctgggggacacggaggaggagttggaacagctccagcgtctggaactcagcactgacatccagaccatcgagctccagatcaaaaagctcgagctccagaaagctgtggaccaccgcaaagccatcatcctctccatcaatctctgcagccctgagttcacccaggctgacagcaaggagagccgggacctgcaggatcgcttgtcgcagatgaatgggcgctgggaccgagtgtgctctctgctggaggagtggcggggcctgctgcaggatgccctgatgcagtgccagatatttactgggcaagtaggcagacccttcttgaacatcaaaggtttccatgaaatgagccatggtttgcttcttatgctggagaacattgacagaaggaaaaatgaaattgtccctattgattctaaccttgatgcagagatacttcaggaccatcacaaacagcttatgcaaataaagcatgagctgttggaatcccaactcagagtagcctctttgcaagacatgtcttgccaactactggtgaatgctgaaggaacagactgtttagaagccaaagaaaaagtccatgttattggaaatcggctcaaacttctcttgaaggaggtcagtcgtcatatcaaggaactggagaagttattagacgtgtcaagtagtcagcaggatttgtcttcctggtcttctgctgatgaactggacacctcagggtctgtgagtcccacatcaggaaggagcaccccaaacagacagaaaacgccacgaggcaagtgtagtctctcacagcctggaccctctgtcagcagtccacatagcaggtccacaaaaggtggctccgattcctccctttctgagccagggccaggtcggtccggccgcggcttcctgttcagagtcctccgagcagctcttccccttcagcttctcctgctcctcctcatcgggcttgcctgccttgtaccaatgtcagaggaagactacagctgtgccctctccaacaactttgcccggtcattccaccccatgctcagatacacgaatggccctcctccactctgaactaagcagatgccatctgcagaagtgctggtagcataaggaggatcgggtcataagcaatcccaaactaccaacaagaggaccttgatcttggcgaaagccctcggtgtggcagctttagccctcctccagatcacatgtgtgcaaattatggcttcagaggtggaagataaacagtgacgggggaacaaacagacaacaagaaggtttggaagaaatctggtttgagactctgaaccttagcactaaggagattgagtaaggacctccaaagttccccggactcatgaattctgggcccttggcccattctgtgcacagccaaggacttcagtagaccatctgggcagctttcccatggtgctgctccaaccatcagataaatgaccctcccaagcaccatgtcagtgtcgtacaatctaccaaccaaccagtgctgaagagattttagaaccttgtaacatacaatttttaagagcttatatggcagcttcctttttaccttgttttcctttggggcatgatgttttaacctttgctttagaagcacaagctgtaaatctaaaaggcacttttttttagaggtataaagaaaaactagatgtaataaataagatcatggaaggctttatgtgaaaaaagttgaatgttatagtaaaaaaaaaaagatatttatgtatgtacagtttgctaaagccaagttttgtttgtattgatttctttgcatttattatagatattataaa

SEQ ID NO: 2492 - protein, 4535 aa, Homo sapiens
MNVVEVFLEKFTTEWDNLARSDAESTAVHLEALKKLALQERKYAIEDLKDQKQKMIEHLNLDDKELVKEQTSHLEQRWFQLEDLIKRKIQVSVTNLEELNVVQSRFQELMEWAEEQQPNIAEALKQSPPPDMAQNLLMDHLAICSELEAKQMLLKSLIKDADRVMADLQERQVIQKALSDAQSHVNCLSDLVGQRRKYLNKALSEKTQFLMAVFQATSQIQQHERKIMFREHICLLPDDVSKQVKTCKSAQASLKTYQNEVTGLWAQGRELMKEVTEQEKSEVLGKLQELQSVYDSVLQKCSHRLQELEKNLVSRKHFKEDFDKACHWLKQADIVTFPEINLMNESTELHTQLAKYQNIQSPEYENLLLTLQRTGQTILPSLNEVDHSYLSEKLNALPRQFNVIVAKDKFYKVQEAILARKEYASLIELTTQSLSELEAQFLRMSKVPTDLAVEEALSLQDGCRAILDEVAGLGEAVDELNQKKEGFRSTGQPWQPDKMLHLVTLYHRLKRQTEQRVSLLEDTTSAYQEHEKMCQQLERQLKSVKEEQSKVNEETLPAEEKLKMYHSLAGSLQDSGIVLKRVTIHLEDLAPHLDPLAYEKARHQIQSWQGELKLLTSAIGETVTECESRMVQSIDFQTEMSRSLDWLRRVKAELSGPVYLDLNLQDIQEEIRKIQIHQEEVQSSLRIMNALSHKEKEKFTKAKELISADLEHSLAELSELDGDIQEALRTRQATLTEIYSQCQRYYQVFQAANDWLEDAQELLQLAGNGLDVESAEENLKSHMEFFSTEDQFHSNLEELHSLVATLDPLIKPTGKEDLEQKVASLELRSQRMSRDSGAQVDLLQRCTAQWHDYQKAREEVIELMNDTEKKLSEFSLLKTSSSHEAEEKLSEHKALVSVVNSFHEKIVEEKASQLEKTGNDASKATLSRSMTTVWQRWTRLRAVAQDQEKIDAVDEWTGFNNKVKKATEMIDQLQDKLPGSSAEKASKAELLTLLEYHDTFVLELEQQQSALGMLRQQTLSMLQDGAAPTPGEEPPLMQEITAMQDRCLNMQEKVKTNGKLVKQELKDREMVETQINSVKCWVQETKEYLGNPTIEIDAQLEELQILLTEATNHRQNIEKMAEEQKEKYLGTILPSELSLQLAEVDLKIRDQIQDKIKEVEQSKATSQELSRQIQKLAKDLTTILTKLKAKTDNVVQAKTDQKVLGEELDGCNSKLMELDAAVQKFLEQNGQLGKPLAKKIGKLTELHQQTIRQAENRLSKLNQAASHLEEYNEMLELILKWIEKAKVLAHGTIAWNSASQLREQYILHQTLLEESKEIDSELEAMTEKLQYLTSVYCTEKMSQQVAELGRETEELRQMIKIRLQNLQDAAKDMKKFEAELKKLQAALEQAQATLTSPEVGRLSLKEQLSHRQHLLSEMESLKPKVQAVQLCQSALRIPEDVVASLPLCHAALRLQEEASRLQHTAIQQCNIMQAAVVQYEQYEQEMKHLQQLIEGAHREIEDKPVATSNIQELQAQISRHEELAQKIKGYQEQIASLNSKCKMLTMKAKHATMLLTVTEVEGLAEGTEDLDGELLPTPSAHPSVVMMTAGRCHTLLSPVTEESGEEGTNSEISSPPACRSPSPVANTDASVNQDIAYYQALSAERLQTDAAKIHPSTSASQEFYEPGLEPSATAKLGDLQRSWETLKNVISEKQRTLYEALERQQKYQDSLQSISTKMEAIELKLSESPEPGRSPESQMAEHQALMDEILMLQDEINELQSSLAEELVSESCEADPAEQLALQSTLTVLAERMSTIRMKASGKRQLLEEKLNDQLEEQRQEQALQRYRCEADELDSWLLSTKATLDTALSPPKEPMDMEAQLMDCQNMLVEIEQKVVSELSVHNENLLLEGKAHTKDEAEQLAGKLRRLKGSLLELQRALHDKQLNMQGTAQEKEESDVDLTATQSPGVQEWLAQARTTWTQQRQSSLQQQKELEQELAEQKSLLRSVASRGEEILIQHSAAETSGDAGEKPDVLSQELGMEGEKSSAEDQMRMKWESLHQEFSTKQKLLQNVLEQEQEQVKRPNRLLSGVPLYKGDVPTQDKSAVTSLLDQQAFEEVSSQSGGAKRQSIHLEQKLYDGVSATSTWLDDVEERLFVATALLPEETETCLFNQEILAKDIKEMSEEMDKNKNLFSQAFPENGDNRDVIEDTLGCLLGRLSLLDSVVNQRCHQMKERLQQILNFQNDLKVLFTSLADNKYIILQKLANVFEQPVAEQIEAIQQAEDGLKEFDAGIIELKRRGDKLQVEQPSMQELSKLQDMYDELMMIIGSRRSQQNLTLKSQYERALQDLADLLETGQEKMAGDQKIIVSSKEEIQQLLDKHKEYFQGLESHMILTETLFRKIISFAVQKETQFHTELMAQASAVLKRAHKRGVELEYITWSHLDEDQQELSRQLEVVESSIPSVGLVEENEDRLIDRITLYQHLKSSLNEYQPKLYQVLDDGKRLLISISCSDLESQLNQLGECWLSNTNKMSKELHRLETILKHWTRYQSESADLIHWLQSAKDRLEFWTQQSVTVPQELEMVRDHLNAFLEFSKEVDAQSSLKSSVLSTGNQLLRLKKVDTATLRSELSRIDSQWTDLLTNIPAVQEKLHQLQMDKLPSRHAISEVMSWISLMENVIQKDEDNIKNSIGYKAIHEYLQKYKGFKIDINCKQLTVDFVNQSVLQISSQDVESKRSDKTDFAEQLGAMNKSWQILQGLVTEKIQLLEGLLESWSEYENNVQCLKTWFETQEKRLKQQHRIGDQASVQNALKDCQDLEDLIKAKEKEVEKIEQNGLALIQNKKEDVSSIVMSTLRELGQTWANLDHMVGQLKILLKSVLDQWSSHKVAFDKINSYLMEARYSLSRFRLLTGSLEAVQVQVDNLQNLQDDLEKQERSLQKFGSITNQLLKECHPPVTETLTNTLKEVNMRWNNLLEEIAEQLQSSKALLQLWQRYKDYSKQCASTVQQQEDRTNELLKAATNKDIADDEVATWIQDCNDLLKGLGTVKDSLFVLHELGEQLKQQVDASAASAIQSDQLSLSQHLCALEQALCKQQTSLQAGVLDYETFAKSLEALEAWIVEAEEILQGQDPSHSSDLSTIQERMEELKGQMLKFSSMAPDLDRLNELGYRLPLNDKEIKRMQNLNRHWSLISSQTTERFSKLQSFLLQHQTFLEKCETWMEFLVQTEQKLAVEISGNYQHLLEQQRAHELFQAEMFSRQQILHSIIIDGQRLLEQGQVDDRDEFNLKLTLLSNQWQGVIRRAQQRRGIIDSQIRQWQRYREMAEKLRKWLVEVSYLPMSGLGSVPIPLQQARTLFDEVQFKEKVFLRQQGSYILTVEAGKQLLLSADSGAEAALQAELAEIQEKWKSASMRLEEQKKKLAFLLKDWEKCEKGIADSLEKLRTFKKKLSQSLPDHHEELHAEQMRCKELENAVGSWTDDLTQLSLLKDTLSAYISADDISILNERVELLQRQWEELCHQLSLRRQQIGERLNEWAVFSEKNKELCEWLTQMESKVSQNGDILIEEMIEKLKKDYQEEIAIAQENKIQLQQMGERLAKASHESKASEIEYKLGKVNDRWQHLLDLIAARVKKLKETLVAVQQLDKNMSSLRTWLAHIESELAKPIVYDSCNSEEIQRKLNEQQELQRDIEKHSTGVASVLNLCEVLLHDCDACATDAECDSIQQATRNLDRRWRNICAMSMERRLKIEETWRLWQKFLDDYSRFEDWLKSSTAAFPSSSGVIYTVAKEELKKFEAFQRQVHECLTQLELINKQYRRLARENRTDSACSLKQMVHEGNQRWDNLQKRVTSILRRLKHFIGQREEFETARDSILVWLTEMDLQLTNIEHFSECDVQAKIKQLKAFQQEISLNHNKIEQIIAQGEQLIEKSEPLDAAIIEEELDELRRYCQEVFGRVERYHKKLIRLPLPDDEHDLSDRELELEDSAALSDLHWHDRSADSLLSPQPSSNLSLSLAQPLRSSGRDTPASVDSIPLEWDHDYDLSRDLESAMSRALPSEDEEGQDDKDFYLRGAVGLSGDHSALESQIRQLGKALDDSRFQIQQTENIIRSKTPTGPELDTSYKGYMKLLGECSSSIDSVKRLEHKLKEEEESLPGFVNLHSTETQTAGVIDRWELLQAQALSKELRMKQNLQKWQQFNSDLNSIWAWLGDTEEELEQLQRLELSTDIQTIELQIKKLELQKAVDHRKAIILSINLCSPEFTQADSKESRDLQDRLSQMNGRWDRVCSLLEEWRGLLQDALMQCQIFTGQVGRPFLNIKGFHEMSHGLLLMLENIDRRKNEIVPIDSNLDAEILQDHHKQLMQIKHELLESQLRVASLQDMSCQLLVNAEGTDCLEAKEKVHVIGNRLKLLLKEVSRHIKELEKLLDVSSSQQDLSSWSSADELDTSGSVSPTSGRSTPNRQKTPRGKCSLSQPGPSVSSPHSRSTKGGSDSSLSEPGPGRSGRGFLFRVLRAALPLQLLLLLLIGLACLVPMSEEDYSCALSNNFARSFHPMLRYTNGPPPL

SEQ ID NO: 2493 - DNA, 5318 bp, Homo sapiens
cggccgccggccgcagcgggctgagattgttgtcctctgtcaccagggcggctgggctcccgcagtcctgcagaccgcgcccgatcccggcgacagggcgggcggacagccgcgcatccccggggtcccgccgagcctgggcgcagagagccgggaggaagcgttcgctcgcttcgccttgctgctgggaaactgaacgaggccgagagagaaggttcttgagttcatgtaagaggacagtcttaaaacggaagaagaaaaagaagcagttcagtctttgggagagctgcctccttgttgagtgctgcaaaggcctggaattcatttatgacagaatagatctagaaaagtccaagcatgttttctagagtggtgtagccctgtgctgcctccagtgaagagtctcttggtgttggcttcgtgcttccggagggaccatggcaacctccagaggggcctcccggtgtcctcgggatatcgccaatgtgatgcagaggctgcaagatgagcaagagatagtacaaaaacgaactttcacaaaatggatcaactctcatctggccaagcggaaacctccaatggtggtggacgatctttttgaagacatgaaagatggtgttaaactgcttgcccttctggaggtcctgtctgggcagaaactgccttgtgaacaaggacgccggatgaagcgaatccatgctgtggctaacattggcacggcactcaagttcctcgaaggaagaaagtccatgcacagaggatcaccgattaaattagtcaacattaactccaccgatatagctgatggccgaccctcaatagttcttggattgatgtggaccattattctatatttccagattgaagagttgaccagcaacctgccccagctccagtctttgtccagcagcgcatcctccgtggacagcatagttagctctgagactcccagcccaccaagtaaacggaaggtgaccaccaagatccaaggaaatgctaagaaggctttattaaagtgggttcagtacacagctggcaagcagactggaatagaagtaaaagattttgggaagagttggagaagcggggttgcctttcattcagttattcatgccattcgaccggaattggtggacttggagacagtgaaaggcagatccaaccgagaaaatttggaggatgctttcactatcgccgaaacagaactggggatcccaagactgctagatcctgaagacgttgatgtggataaaccagatgagaaatctattatgacctatgtagcccagtttctgaaacattatcctgacatccacaatgcaagcactgatgggcaagaggatgatgaaatacttccaggtttcccatcttttgcaaattctgtacaaaattttaagagagaagacagagtaatttttaaggaaatgaaagtttggatagaacaatttgagagagatttgacaagagcacagatggtggaatcaaatttacaggataaatatcagtcatttaagcacttcagagttcaatatgaaatgaagaggaaacagattgaacatttaatacaaccattacacagagacggtaaattgtcacttgaccaagcattggtaaaacaatcttgggatagagtgacctccaggctctttgactggcatatacagcttgataaatctcttcctgcacctctgggcaccataggtgcctggctgtacagagcggaggtggccctgagagaggaaataaccgttcaacaggtccacgaggaaacagcaaacacgatacaacggaaacttgagcaacataaggatctgcttcaaaacacggatgcccacaaaagagcattccatgaaatctaccggaccaggtctgttaacgggattccagtgccacctgatcaattagaggacatggccgagaggtttcattttgtttcctccacatcagagctacacctaatgaaaatggaatttttagaattaaagtaccgtctgctctcactgctggttcttgcagagtcaaagctgaagtcttggatcattaagtacgggaggagagagtcagtggagcagcttctacaaaactacgtgtcttttatagaaaatagcaagttctttgaacaatatgaggtgacataccagatcttgaaacagacagctgagatgtatgtcaaagcagatggttcagtggaagaagctgagaatgtgatgaaattcatgaatgaaaccaccgctcagtggaggaatctctcagtagaagtgaggagtgtgaggagcatgctggaagaagtgatctctaactgggatcgctatggcaatacagtggctagtctgcaagcctggctagaggatgctgaaaaaatgctcaatcaatcagaaaatgccaaaaaggatttttttcgaaatttacctcattggattcagcagcatactgccatgaacgatgctggcaattttctaattgaaacctgtgatgagatggtttcccgtgacctgaagcagcaattactgttgctaaatgggcggtggagggagttgtttatggaagtcaagcaatatgctcaagctgatgagatggacagaatgaagaaggaatacacagactgtgttgttaccctgtctgcttttgcaacggaagcccataagaaactttctgaacccttagaagtctcttttatgaatgtcaagctattaattcaagacttggaggatattgagcagagggtgcctgtgatggatgcccaatacaagataattacaaagacagcacacctcattaccaaagaaagcccccaagaagaaggaaaagaaatgtttgcgaccatgtcaaagctcaaagagcagctaaccaaggtcaaagaatgttactccccactcctttatgagtctcagcagctgttgattccgttggaggaattagaaaagcagatgacgtccttttatgactcacttgggaaaatcaatgaaattatcacagttcttgagcgtgaggcacaatcgagtgccctttttaaacaaaaacatcaggaactgttagcttgtcaagaaaactgtaagaaaaccttgacacttattgagaaaggcagtcaaagtgttcaaaagtttgtgaccttgagcaacgtgttaaagcattttgatcagacgaggctacaaagacagattgcagatattcatgttgcttttcagagtatggtaaagaaaactggagattggaagaagcatgtggaaaccaacagtcgcttgatgaagaagtttgaggagtctcgagcagagttggagaaggtactgcggattgctcaggagggcctggaggaaaagggggatccagaggagctcctgcggagacacactgagtttttcagtcagctggatcagagggtgctcaatgctttcctgaaagcttgtgatgaactcaccgacatccttccagagcaggagcagcaggggctgcaggaagctgttcgaaagctccacaaacaatggaaggatcttcaaggagaagccccttatcatttgcttcatctgaagattgatgtggagaagaataggttcttagcctctgtagaagaatgcagaactgagctggatcgagagaccaagctgatgccccaggaaggcagtgaaaagataattaaagagcacagggttttcttcagtgacaaaggtcctcatcatctctgtgagaaaaggttacagctcatcgaggaactctgtgtgaaactcccagtgcgggacccagtaagggacacacctggaacctgtcacgtgactctcaaagagctcagagctgccattgacagcacctacaggaagctcatggaagacccagacaagtggaaggactacactagcagattctctgagttctcatcttggatatctacaaatgagacacaattaaaggggatcaagggtgaggccatcgatactgccaaccacggagaggttaaacgtgccgttgaagagatcagaaatggtgttaccaaaaggggtgagaccctcagctggctgaaatccaggctgaaagttttgacagaagtttcttctgagaatgaagcccaaaagcagggagatgagctggcaaaattatccagctctttcaaggctcttgtgacgctgctgtcagaggttgaaaagatgctaagcaattttggggactgtgtccagtacaaagaaatagtcaaaaattctctcgaagaattaatttctggctctaaagaagtccaggaacaagctgagaagatcttggatactgaaaatctgtttgaagcacagcagttacttcttcatcaccagcaaaagacaaagcggatctcagcaaagaagagagatgtgcagcagcagatcgcgcaggcgcagcagggagaaggggggctgcctgaccgaggccacgaggagctgcggaagctggagagcacactggatggcctggagcgcagccgggagaggcaggaacgccgcatccaggtcacattaagaaaatgggagcgatttgaaacaaacaaagaaacagtagtaagatacctttttcaaacaggttccagtcatgaacgcttcttgagttttagcagtttggaaagtttatcttcagaactggaacaaacaaaggagttttctaaacggacagaaagtattgcagtccaggctgagaaccttgtaaaggaagcttcagagataccgcttgggccccaaaataagcagctgcttcaacagcaggccaagtcaatcaaagaacaagtcaaaaaattagaagacacgcttgaagaagagtatgtgattgacaagtcctaaactttcttctctgagataaagtttcatacaatctttcctgtaccttgtattcaaaacactcttttaaaatctcaaagtgtctgtgtatttcagcatgttttgaggaaacaactcacagttcaaaagaaagtatcgctaatacagaaaccaatatctataacagagcccaaaaaatataaaggatgtgggttttgcatcttaaactgatcatgttcatgagaaagccatatctattctattctgtggcctttgtacattgtagagggaatcttgaaaaagaactaatatttaaaataatttttttactatattattctgctgtcaccatttagagcgaaaaggagatattttgttagtgtagattccaggcctaaatacacatcacatagaccatatatctccaacctgaagaagctcctggagcttgtttacagtgcctcggtattcaagttatcctgactaatatgctctttccagaaattaactttaaaatattttatttttaaacttttaatgtttgtttatctg

SEQ ID NO: 2494 - protein, 1444 aa, Homo sapiens
MATSRGASRCPRDIANVMQRLQDEQEIVQKRTFTKWINSHLAKRKPPMVVDDLFEDMKDGVKLLALLEVLSGQKLPCEQGRRMKRIHAVANIGTALKFLEGRKSMHRGSPIKLVNINSTDIADGRPSIVLGLMWTIILYFQIEELTSNLPQLQSLSSSASSVDSIVSSETPSPPSKRKVTTKIQGNAKKALLKWVQYTAGKQTGIEVKDFGKSWRSGVAFHSVIHAIRPELVDLETVKGRSNRENLEDAFTIAETELGIPRLLDPEDVDVDKPDEKSIMTYVAQFLKHYPDIHNASTDGQEDDEILPGFPSFANSVQNFKREDRVIFKEMKVWIEQFERDLTRAQMVESNLQDKYQSFKHFRVQYEMKRKQIEHLIQPLHRDGKLSLDQALVKQSWDRVTSRLFDWHIQLDKSLPAPLGTIGAWLYRAEVREEITVQQVHEETANTIQRKLEQHKDLLQNTDAHKRAFHEIYRTRSVNGIPVPPDQLEDMAERFHFVSSTSELHLMKMEFLELKYRLLSLLVLAESKLKSWIIKYGRRESVEQLLQNYVSFIENSKFFEQYEVTYQILKQTAEMYVKADGSVEEAENVMKFMNETTAQWRNLSVEVRSVRSMLEEVISNWDRYGNTVASLQAWLEDAEKMLNQSENAKKDFFRNLPHWIQQHTAMNDAGNFLIETCDEMVSRDLKQQLLLLNGRWRELFMEVKQYAQADEMDRMKKEYTDCVVTLSAFATEAHKKLSEPLEVSFMNVKLLIQDLEDIEQRVPVMDAQYKIITKTAHLITKESPQEEGKEMFATMSKLKEQLTKVKECPLLYESQQLLIPLEELEKQMTSFYDSLGKINEIITVLEREAQSSALFKQKHQELLACQENCKKTLTLIEKGSQSVQKFVTLSNVLKHFDQTRLQRQIADIHVAFQSMVKKTGDWKKHVETNSRLMKKFEESRAELEKVLRIAQEGLEEKGDPEELLRRHTEFFSQLDQRVLNAFLKACDELTDILPEQEQQGLQEAVRKLHKQWKDLQGEAPYHLLHLKIDVEKNRFLASVEECRTELDRETKLMPQEGSEKIIKEHRVFFSDKGPHHLCEKRLQLIEELCVKLPVRDPVRDTPGTCHVTLKELRAAIDSYKLMEDPDKWKDYTSRFSEFSSWISTNETQLKGIKGEAIDTANHGEVKRAVEEIRNGVTKRGETLSWLKSRLKVLTEVSSENEAQKQGDELAKLSSSFKALVTLLSEVEKMLSNFGDCVQYKEIVKNSLEELISGSKEVQEQAEKILDTENLFEAQQLLLHHQQKTKRISAKKRDVQQQIAQAQQGEGGLPDRGHEELRKLESTLDGLERSRERQERRIQVTLRKWERFETNKETVVRYLFQTGSSHERFLSFSSLESLSSELEQTKEFSKRTESIAVQAENLVKEASEIPLGPQNKQLLQQQAKSIKEQVKKLEDTLEEEYVIDKS

SEQ ID NO: 2495 - DNA, 18561 bp, Homo sapiens
cggccgccggccgcagcgggctgagattgttgtcctctgtcaccagggcggctgggctcccgcagtcctgcagaccgcgcccgatcccggcgacagggcgggcggacagccgcgcatccccggggtcccgccgagcctgggcgcagagagccgggaggaagcgttcgctcgcttcgccttgctgctgggaaactgaacgaggccgagagagaaggttcttgagttcatgtaagaggacagtcttaaaacggaagaagaaaaagaagcagttcagtctttgggagagctgcctccttgttgagtgctgcaaaggcctggaattcatttatgacagaatagatctagaaaagtccaagcatgttttctagagtggtgtagccctgtgctgcctccagtgaagagtctcttggtgttggcttcgtgcttccggagggaccatggcaacctccagaggggcctcccggtgtcctcgggatatcgccaatgtgatgcagaggctgcaagatgagcaagagatagtacaaaaacgaactttcacaaaatggatcaactctcatctggccaagcggaaacctccaatggtggtggacgatctttttgaagacatgaaagatggtgttaaactgcttgcccttctggaggtcctgtctgggcagaaactgccttgtgaacaaggacgccggatgaagcgaatccatgctgtggctaacattggcacggcactcaagttcctcgaaggaagaaagtccatgcacagaggatcaccgattaaattagtcaacattaactccaccgatatagctgatggccgaccctcaatagttcttggattgatgtggaccattattctatatttccagattgaagagttgaccagcaacctgccccagctccagtctttgtccagcagcgcatcctccgtggacagcatagttagctctgagactcccagcccaccaagtaaacggaaggtgaccaccaagatccaaggaaatgctaagaaggctttattaaagtgggttcagtacacagctggcaagcagactggaatagaagtaaaagattttgggaagagttggagaagcggggttgcctttcattcagttattcatgccattcgaccggaattggtggacttggagacagtgaaaggcagatccaaccgagaaaatttggaggatgctttcactatcgccgaaacagaactggggatcccaagactgctagatcctgaagacgttgatgtggataaaccagatgagaaatctattatgacctatgtagcccagtttctgaaacattatcctgacatccacaatgcaagcactgatgggcaagaggatgatgaaatacttccaggtttcccatcttttgcaaattctgtacaaaattttaagagagaagacagagtaatttttaaggaaatgaaagtttggatagaacaatttgagagagatttgacaagagcacagatggtggaatcaaatttacaggataaatatcagtcatttaagcacttcagagttcaatatgaaatgaagaggaaacagattgaacatttaatacaaccattacacagagacggtaaattgtcacttgaccaagcattggtaaaacaatcttgggatagagtgacctccaggctctttgactggcatatacagcttgataaatctcttcctgcacctctgggcaccataggtgcctggctgtacagagcggaggtggccctgagagaggaaataaccgttcaacaggtccacgaggaaacagcaaacacgatacaacggaaacttgagcaacataaggatctgcttcaaaacacggatgcccacaaaagagcattccatgaaatctaccggaccaggtctgttaacgggattccagtgccacctgatcaattagaggacatggccgagaggtttcattttgtttcctccacatcagagctacacctaatgaaaatggaatttttagaattaaagtaccgtctgctctcactgctggttcttgcagagtcaaagctgaagtcttggatcattaagtacgggaggagagagtcagtggagcagcttctacaaaactacgtgtcttttatagaaaatagcaagttctttgaacaatatgaggtgacataccagatcttgaaacagacagctgagatgtatgtcaaagcagatggttcagtggaagaagctgagaatgtgatgaaattcatgaatgaaaccaccgctcagtggaggaatctctcagtagaagtgaggagtgtgaggagcatgctggaagaagtgatctctaactgggatcgctatggcaatacagtggctagtctgcaagcctggctagaggatgctgaaaaaatgctcaatcaatcagaaaatgccaaaaaggatttttttcgaaatttacctcattggattcagcagcatactgccatgaacgatgctggcaattttctaattgaaacctgtgatgagatggtttcccgtgacctgaagcagcaattactgttgctaaatgggcggtggagggagttgtttatggaagtcaagcaatatgctcaagctgatgagatggacagaatgaagaaggaatacacagactgtgttgttaccctgtctgcttttgcaacggaagcccataagaaactttctgaacccttagaagtctcttttatgaatgtcaagctattaattcaagacttggaggatattgagcagagggtgcctgtgatggatgcccaatacaagataattacaaagacagcacacctcattaccaaagaaagcccccaagaagaaggaaaagaaatgtttgcgaccatgtcaaagctcaaagagcagctaaccaaggtcaaagaatgttactccccactcctttatgagtctcagcagctgttgattccgttggaggaattagaaaagcagatgacgtccttttatgactcacttgggaaaatcaatgaaattatcacagttcttgagcgtgaggcacaatcgagtgccctttttaaacaaaaacatcaggaactgttagcttgtcaagaaaactgtaagaaaaccttgacacttattgagaaaggcagtcaaagtgttcaaaagtttgtgaccttgagcaacgtgttaaagcattttgatcagacgaggctacaaagacagattgcagatattcatgttgcttttcagagtatggtaaagaaaactggagattggaagaagcatgtggaaaccaacagtcgcttgatgaagaagtttgaggagtctcgagcagagttggagaaggtactgcggattgctcaggagggcctggaggaaaagggggatccagaggagctcctgcggagacacactgagtttttcagtcagctggatcagagggtgctcaatgctttcctgaaagcttgtgatgaactcaccgacatccttccagagcaggagcagcaggggctgcaggaagctgttcgaaagctccacaaacaatggaaggatcttcaaggagaagccccttatcatttgcttcatctgaagattgatgtggagaagaataggttcttagcctctgtagaagaatgcagaactgagctggatcgagagaccaagctgatgccccaggaaggcagtgaaaagataattaaagagcacagggttttcttcagtgacaaaggtcctcatcatctctgtgagaaaaggttacagctcatcgaggaactctgtgtgaaactcccagtgcgggacccagtaagggacacacctggaacctgtcacgtgactctcaaagagctcagagctgccattgacagcacctacaggaagctcatggaagacccagacaagtggaaggactacactagcagattctctgagttctcatcttggatatctacaaatgagacacaattaaaggggatcaagggtgaggccatcgatactgccaaccacggagaggttaaacgtgccgttgaagagatcagaaatggtgttaccaaaaggggtgagaccctcagctggctgaaatccaggctgaaagttttgacagaagtttcttctgagaatgaagcccaaaagcagggagatgagctggcaaaattatccagctctttcaaggctcttgtgacgctgctgtcagaggttgaaaagatgctaagcaattttggggactgtgtccagtacaaagaaatagtcaaaaattctctcgaagaattaatttctggctctaaagaagtccaggaacaagctgagaagatcttggatactgaaaatctgtttgaagcacagcagttacttcttcatcaccagcaaaagacaaagcggatctcagcaaagaagagagatgtgcagcagcagatcgcgcaggcgcagcagggagaaggggggctgcctgaccgaggccacgaggagctgcggaagctggagagcacactggatggcctggagcgcagccgggagaggcaggaacgccgcatccaggtcacattaagaaaatgggagcgatttgaaacaaacaaagaaacagtagtaagatacctttttcaaacaggttccagtcatgaacgcttcttgagttttagcagtttggaaagtttatcttcagaactggaacaaacaaaggagttttctaaacggacagaaagtattgcagtccaggctgagaaccttgtaaaggaagcttcagagataccgcttgggccccaaaataagcagctgcttcaacagcaggccaagtcaatcaaagaacaagtcaaaaaattagaagacacgcttgaagaagatattaaaaccatggaaatggtgaaaaccaagtgggatcattttggcagtaattttgagactctgtccgtctggataactgagaaagaaaaagaactcaatgccttggaaacttcgtcatctgccatggacatgcaaatcagccaaattaaggtcacaattcaggaaatagaaagtaagctcagcagcattgtaggattagaagaagaagcccagtcttttgctcagtttgttaccactggagaatctgctcgaattaaagccaagttgacacaaataagaagatacggggaagagcttcgagagcatgcacagtgtctggaaggaacaatcctgggacatttatctcagcagcaaaagtttgaagagaaccttagaaagatccagcaatctgtgtctgaatttgaagataaacttgctgttccaattaaaatatgttcttcagctacagaaacatacaaagttcttcaagaacatatggatctctgccaggccctggagtcactgagcagcgcgatcactgccttctcagccagtgccaggaaggttgtgaacagagattcctgtgttcaggaggctgcggctctacagcagcaatacgaggacatcctaaggagggcgaaggagagacagacggcgctggagaatctgctggcccactggcagaggctagagaaagaactatcatcctttttgacctggttagagcggggtgaagctaaagccagttccccagaaatggacatttctgcagacagagtcaaagtggaaggtgaacttcagttaatacaggcactgcaaaatgaagttgtatcccaggcctcattctatagcaaacttttgcaattgaaggaatcattgttctcagtagcctccaaagatgatgtgaaaatgatgaaactacatttggagcagttggatgagagatggagagatttaccacagatcattaacaaaaggattaattttcttcagtctgtggttgctgaacaccagcaatttgatgagctgctgctttccttttctgtctggattaaactgtttctcagtgaattacaaactacctctgagattagcataatggaccatcaagtagcccttactcggcataaggaccacgcagcagaagtagagagcaaaaagggcgaattgcagagtctgcagggtcacttagcaaagttgggttctctgggccgtgctgaggacctccacctcctgcagggaaaggctgaggactgcttccagctgtttgaggaggccagccaggttgtggagaggcggcagcttgccctgtcccatttggcagaattcctccagagccatgcctctctgtccggcattctccgccagctgaggcaaacagtggaagcaaccaacagtatgaataagaacgagtctgatttgatagaaaaggacctcaatgatgctcttcaaaatgctaaagcattagaatctgctgccgtcagtctggatggcattctttccaaagcccaataccatctgaaaatcgggagctctgagcaaaggacttcctgcagagccacggctgatcagctctgtggagaggtagagaggatccagaaccttctgggaaccaagcagagtgaggcagatgctctggcagtgttgaaaaaagcattccaagaccagaaagaggagcttctgaaaagcattgaggacattgaagaaaggactgacaaagagcgattgaaagaacctacccgccaagctcttcagcagaggttaagagtgtttaatcagctagaagatgaattgaattctcacgagcatgaactatgttggttgaaagacaaagccaagcaaattgcccagaaagatgtagcttttgcacctgaagttgacagggagataaaccgcttagaggtcacctgggatgataccaaaagactaattcatgaaaatcagggtcagtgctgtggacttattgacttaatgagagaatatcagaacctgaaatcagctgtatctaaagtcttagaaaatgccagcagtgtgattgtaaccagaactaccataaaagatcaggaggatcttaaatgggctttttccaagcatgaaactgccaagaacaaaatgaattacaaacagaaagacttggataactttaccagcaaaggaaaacacttgttatctgagctgaagaaaattcacagtagtgatttcagcttggtgaaaacagacatggagagcaccgtggacaaatggctggatgtatcagagaaacttgaagaaaacatggataggctgagagtaagcctgtccatttgggatgatgtactgtcaactagagatgagattgagggatggtcaaacaactgcgttccacagatggcagaaaacatcagcaacctggataaccacctcagagctgaagaactgcttaaagaatttgagtctgaagttaaaaacaaagcattgagattggaagaactgcattccaaagttaatgatctgaaagaattaactaaaaatctagaaacaccgccagaccttcagtttatagaagcagacttaatgcagaaactggagcatgccaaagaaataactgaagtagcaaaaggaaccctgaaggatttcacggctcaaagtacacaagtggagaagtttattaatgacataacaacatggttcacaaaagtggaagaatcgttgatgaactgtgcccaaaatgagacttgtgaagcattgaaaaaagtcaaggatatacaaaaagaacttcaaagtcaacaaagcaacatcagctctacccaagaaaatctcaatagcttgtgccgcaagtaccactcagctgagttggagagcctgggccgtgcaatgactggtctgataaagaaacatgaagccgtgagccagttgtgctccaaaacccaggccagcctgcaggaatctctggaaaaacacttcagtgagtctatgcaggaattccaagaatggtttttgggagcaaaggcagcagcaaaagaatcatcagatcgcaccggtgacagcaaagttctagaagcaaagctccatgatcttcagaacattttggactcagtcagtgatgggcagagcaaacttgatgcagtgactcaagaaggacaaactttgtatgcacatttgtctaaacaaattgtcagtagcattcaagaacaaatcacaaaggccaatgaagagtttcaagcatttctgaaacaatgccttaaagataagcaggctcttcaagactgtgcttcagaacttggaagctttgaagatcagcacagaaaactgaacttatggatccatgaaatggaagaaaggttcaatacggaaaacttgggagagagtaaacagcacattcctgagaagaaaaatgaagttcataaagttgaaatgtttttgggagaactgctggctgcaagagagtctcttgataagctttcccagagagggcagcttctgagtgaagaaggccacggtgctgggcaggagggccgcctgtgttcccagctcctcacaagccaccagaacctacttagaatgaccaaagagaaactccggagctgccaggtggcccttcaggagcacgaagccctggaggaagcactgcaaagcatgtggttctgggtgaaggccattcaggacagactggcctgtgcagagagcactcttgggagcaaagacaccctggagaaacggctgtcacaaatacaggatattctcctgatgaaaggtgaaggggaagttaagttgaatatggccattggcaagggggaacaggccttgagaagtagcaacaaagaaggtcagagggtgattcagactcagttagagacccttaaagaagtgtgggctgacatcatgagctcctccgtccacgctcaaagcactttagagtctgtgattagccaatggaatgactatgtagagaggaaaaaccagttggagcagtggatggaatcagtggatcaaaaaatagaacatcccttacaaccacagccaggtctgaaagagaagttcgtcctgcttgaccacctccagtccatcctgtctgaggcagaagatcacacgagagcccttcaccgtctaattgcgaagtccagggagctctacgaaaagacagaggatgagtctttcaaggacacagctcaagaggagctgaaaacacagtttaatgatataatgactgttgccaaggaaaaaatgaggaaagtggaagagattgtgaaagatcatctaatgtatttagatgcggtccacgagttcacagattggctccattcagcaaaggaagaacttcaccggtggtcagatatgtctggagattcatcagccacccagaaaaagttatcaaaaattaaggagctgatagattccagagagattggtgcaagccgtctcagcagagtggagtcgctggctcccgaagtgaaacagaacacaactgccagtgggtgtgagctcatgcacacggagatgcaggccctgcgtgccgactggaagcagtgggaagacagtgtattccaaacgcagagctgtttggagaacctggtcagccagatggccctttcggagcaggaattctcaggccaagtggctcaactggagcaggccctggaacagttcagtgcccttctgaaaacctgggctcagcagttaaccctcctggaaggcaagaacacggatgaggagatagtggaatgctggcacaaaggacaagagatactggatgctttgcaaaaagcagagcctagaacagaggatctcaagtctcagctgaatgaactttgtcgattttccagagacctgagtacctacagtggaaaagtttctggcttgattaaagagtataattgtctttgtttgcaagcatccaagggctgccagaataaagaacagattttacagcaaagatttcgaaaggccttcagggatttccagcagtggttggttaatgcaaaaatcactaccgccaagtgttttgatatacctcaaaatataagtgaagtttcaactagtcttcagaaaatacaggagtttttgtcagaaagtgaaaatggacagcacaagctaaacatgatgctgtctaaaggggaacttctgagtaccctgctgaccaaagagaaagcgaaagggatccaggccaaagttacagctgcaaaagaagattggaaaaattttcattcaaatctccaccaaaaagaatctgctctagagaatctaaagatccaaatgaaggactttgaagtaagtgctgagcctatccaggactggctgagtaaaactgagaagatggtccatgaaagcagcaatcgcctctatgatctgccagcaaagaggagggagcagcagaagctccagtctgtccttgaggaaatacactgctacgagcctcagctcaacaggctgaaagagaaagctcagcagctgtgggaaggacaagctgccagcaagagctttaggcacagagtgtcgcagctgtcttctcagtatctagcgctaagcaatttaacaaaggagaaagtgtcaagactggatagaatcgttgcagaacacaatcagttctctcttgggattaaagaattacaagactggatgacggatgcgattcacatgctggattcatactgccacccgacatccgacaaaagtgtgctggacagcaggacgctcaagctcgaggctctattatcagtcaaacaggaaaaagagattcagatgaaaatgatagtgaccaggggagaatctgtccttcagaatacttctccagaaggcattcccactattcagcagcagctgcagagtgtgaaggatatgtgggcatcccttttgtctgcagggattcgttgtaaaagccaactcgaaggagctctctccaagtggacaagttatcaggatggcgttcgacagttctccggttggatggatagtatggaagccaacctgaatgaatcagaaaggcagcatgcggagctgcgggataaaacaacgatgctcggaaaagccaagttattaaatgaagaagtgctgagttacagcagcttgctggagaccatcgaagtcaaaggggctggcatgacagaacactatgtcacccagctagaactccaggatctacaggaacgatacagagccatccaagagagggccaaggaagccgtaaccaagtctgaaaaacttgtccgcctgcaccaagagtatcagagagacctaaaggcatttgaagtttggttggggcaagaacaagaaaagctcgaccagtattcagttcttgaaggtgatgcccacactcatgagacaacattgcgtgatcttcaggagctacaggtacactgtgcagaggggcaggccctgttgaactcagtgctgcacaccagagaggatgtgatcccatcaggtatcccacaggcagaggaccgggctttagagtctctccggcaagactggcaggcttaccagcacaggctgtccgagactcgaactcagttcaataacgtggtgaacaaattgaggctaatggagcaaaagtttcagcaagtagatgaatggctcaaaacagcagaggagaaaaagtggcacgaagaagtgactgcatacagagatgaagttgaggaagtgggagctagagctcaggagatactggacgagagccacgtgaacagcagaatgggttgccaggccacccagctgacttccagataccaggccctgcttctccaagtgctggaacaaataaaattcctggaggaggagattcagagtttggaggaatcagaatcatccctcagttcctattctgattggtatggctctactcataaaaacttcaagaatgtggctaccaagattgacaaagtagatacagtaatgatggggaagaaattgaagacgttggaggttttgctcaaagacatggagaaaggtcacagtttgctgaaatcagcccgggagaaaggagagagggctgttaaatacttggaggaaggcgaggcagagaggttaagaaaggagattcatgatcacatggagcagttgaaggaactgaccagcactgtccggaaagaacacatgacgctggaaaaaggtcttcatttagcaaaggaattctcagataaatgcaaagcactgacacagtggatagcagaataccaggaaattctacatgttcctgaagaacccaaaatggaattatatgagaaaaaagctcagttatctaaatacaagtcacttcaacaaacggtgctgtcccatgaaccatcagtaaagtcagtgagagagaagggtgaagctcttttggaactggtgcaggacgtcactttaaaggacaaaatagatcaacttcaaagtgattaccaggacctgtgcagcataggaaaggcaatgatggaagaaattgctggttttgaagaccgtttgaacaatcttcaaatgaaaggtgatactttgattggccaatgtgcagaccacctgcaagcgaaacttaaacaaaacgtgcatgctcatctgcagggcacaaaggacagctactcagcgatctgcagcacagctcagaggatgtaccagagtttggaacacgaacttcagaagcacgtcagccgacaagacaccctgcagcagtgccaggcctggctttctgcagtccagccggatttagagccaagtcctcaaccacctcttagtagggcagaagccattaagcaggtcaaacacttcagagctttgcaagagcaggcaaggacctacctagatctcctttgctccatgtgtgacctgtcaaatgcttcggtgaaaaccacagcaaaagacattcaacaaacagagcaaacgattgaacaaaggcttgtccaggcccagaacttaactcagggctgggaagagatcaagcacctgaagtctgagctctggatttacctgcaagatgctgatcagcaactgcagaacatgaagaggaggcactctgagctggagctgaacattgcacagaacatggtttcacaagttaaggattttgttaagaaactacagagcaaacaggcatccgtgaacaccataatagaaaaggtgaataagttaacaaagaaggaggaatcgcctgaacacaaggaaataaatcatttaaatgatcagtggctcgatttgtgccgtcagtctaacaacctgtgcttgcaaagggaagaggatcttcagagaacaagagattaccatgactgtatgaatgttgttgaagtgttcctagaaaaatttactacagaatgggataacttggccagatctgatgcagagagtacagctgtccacctggaagctttgaaaaagttagcattggcattgcaggagagaaagtatgctattgaagatctgaaagatcaaaagcagaaaatgatagagcatctgaatttagatgacaaggagttagtcaaagaacagacgagtcatttagagcaacgttggtttcagcttgaggacctcattaaaaggaaaatccaagtgtcagtcaccaacttggaggagttaaatgtggtgcagtccagatttcaggagctaatggagtgggcagaagagcaacaacccaacatcgccgaggcccttaagcagagccctcctccagatatggctcagaaccttctcatggatcacctggccatctgcagtgaactggaggccaagcagatgctcctgaaatcgcttataaaggacgcagacagggtcatggcagatcttggtctcaatgagcgacaggtcatccagaaggctctctctgatgcacaaagccacgtgaattgtctcagtgacttagtgggccagcgaagaaagtacttaaacaaagccttgtccgagaaaacccagtttctcatggcagtgttccaggccaccagccaaattcagcaacatgagcgaaagataatgttccgtgaacacatctgtctgttaccagatgatgtgagcaaacaagtcaaaacatgtaagagtgcacaagccagcctcaagacttaccaaaatgaagtcactggactttgggcccagggtcgcgaactaatgaaggaagtcacagagcaggaaaagagtgaagtgctggggaagcttcaggaattgcagagtgtctatgacagtgttttacaaaagtgcagtcaccggttacaagaactagagaagaatttggtttctaggaagcattttaaggaagattttgataaagcttgccactggctaaaacaagcagatattgttacatttcctgaaatcaacctaatgaatgagagtactgagcttcatacacaactggctaaataccaaaacattcttgaacaatctccagaatatgaaaatcttctacttacgctgcagagaactgggcagaccatattaccatcgctgaatgaagtcgatcattcctacctcagtgaaaagctaaatgctttgcctcgacaatttaatgtaattgttgccttggctaaagacaagttctataaagtccaggaagcaattcttgctcggaaggaatatgcttccttgattgagttgacaacccagtctctgagtgaacttgaagcccaattcttgaggatgagcaaagttcccaccgacctggccgttgaggaggctctttctctgcaagatggttgcagagccattctggacgaggtggcgggccttggggaggcggtggatgaactgaaccagaaaaaagaaggttttcgcagcacaggtcagccttggcagccagacaagatgctgcaccttgtcaccttatatcacaggctgaagcgacaaacagaacagagggttagcttattagaagacaccaccagtgcttaccaagaacacgagaagatgtgccaacagctggagagacaactgaagtctgtaaaagaggagcagtccaaagtgaatgaggaaacgctgcctgcagaggagaagctcaaaatgtatcactccctggcaggaagtctccaggactcagggattgtactgaaacgagtaaccatacatcttgaagatcttgccccacaccttgaccccttggcttatgagaaagccaggcatcagatccagtcctggcaaggggagttaaaactgttgacttctgccattggtgagacggtgacagaatgtgagagccgaatggtgcagagtatagacttccagactgagatgagtcgctccctggactggctgaggagagtgaaggcagagctcagtgggccggtgtacctagacctcaacctgcaggacatccaagaggaaatcagaaaaatccaaattcatcaggaagaggtccagtccagcttgagaatcatgaatgcgctgagtcacaaggaaaaggagaagttcacaaaggccaaggagctgatttctgcggatttagaacacagcctcgctgagctctcagagctggatggagacatccaggaagccttacgcaccagacaggctaccttgactgaaatatatagccagtgtcaaaggtattatcaggtatttcaagcagccaatgactggcttgaggatgcccaagaattgttacagctggcaggcaatggcctagacgtggagagcgcagaggaaaatctcaaaagccacatggaatttttcagtacagaggatcagttccatagtaacctggaggagctccacagcctggtagccaccctggacccactcatcaagccaaccggcaaagaagacctagaacagaaagtggcttctctggaactcaggagccagaggatgagccgggactctggtgcccaagtggatctcttgcagagatgcacagctcaatggcacgattaccagaaagcaagggaagaggttattgaattgatgaatgatacagaaaagaaattgtctgagttttctttgttgaagacttcgtctagtcatgaagcggaagaaaaattgtcagaacacaaggctttagtgtcagtggttaactctttccatgagaaaattgtggcccttgaggaaaaagcttcacaactggagaaaaccggaaatgatgccagcaaagccaccctgagcaggtcaatgaccaccgtctggcagcgctggacacgccttcgagctgtggcccaggaccaggagaagatcctggaagatgcagtggatgagtggacgggctttaacaacaaggttaaaaaggccactgaaatgattgatcagctgcaagataagttacctggaagttcagcagagaaagcatcgaaagcagagctcttaactcttcttgaataccacgacacgttcgttctggagctggagcagcagcagtcggccttgggcatgctgcggcagcaaaccctgagcatgctccaggatggagccgccccaacccctggggaagagcctccgctcatgcaggaaatcaccgccatgcaagatcggtgcctgaacatgcaggagaaagtgaagactaatggaaagttggtgaagcaagagctgaaggaccgagaaatggtggagactcagatcaattctgtgaaatgttgggttcaggaaacgaaagaatatttagggaatccaacaatagaaatagatgctcaacttgaagaacttcagattctcctaacagaagccacaaatcaccgacagaacattgaaaaaatggcagaagaacagaaggagaagtacttaggtctttataccatattaccttctgaactctcccttcagttggctgaagtggcgttagatctaaagatccgagatcagatccaagacaaaataaaagaagttgagcagagcaaggccacgagccaggaactcagccggcaaattcagaagttagctaaagacctcacaactattctaactaagctgaaagcgaagacagataatgtagttcaagctaaaactgaccaaaaggtgctgggagaggaattagatggctgtaattcaaagttaatggaattagatgcagcagtacagaaattcttggaacagaatggccaactgggtaagccactggccaagaagataggaaaactgactgaacttcaccagcagaccattagacaagctgagaatcggctctccaagctcaatcaggcagcatcacatttagaagaatacaatgaaatgcttgaattaattttgaagtggattgaaaaagctaaagtcttggctcatggaactattgcatggaattctgcaagccagcttcgggaacaatatattttgcatcaggtaaccttaggaaaaataatctttaaaaagtaaccaagggcaatttgatttaactgggtagactgacacaacacttagagggctgtgatgtaaaatttttggagctaccagataaaaagaatgctaaggtacccctaagttgttcagtagttggacagaaaggagcttctcatgaaatttcatgaaattgaataaataaatatccttgatcttccctaaacctaccttacaccaagacccaaaccaatcagccttgtagaactcattttctgtagcttctttgaaataattatctgcagggatctggtgggaaattctttcctgtgaagagatgcaatgaagtgtggaaagattctagactccacactcagactggtgggaaaaccaagctccgccatgcagggctgtgtgatttggagcagaatgctttgcctctctgaattctgtcttctcatcatttgtatgaagacgtaaataatattcgtatttcagacttatgagatcaagtggtttaaggtacacacgtgcaaacgtctgcctggcacatgcaggtgctcagtgggagatctcccgcctcctccctcagccctcacccaggcctgtcatctggccttccacaggaggtcgggcagcccagagcaagccatgagtccacatcacatgctggctatgttagttcatttcctctgaagttacatgagaaaaatgttccttttctgtcagtcacgtcatccaggaaattatttcatccttttgtaacttaagcttaaattagacacagatagttaataggctagttatcatataataaaatatagggtgacttttataggagttacatgggtatcgagtattctagatttttgtctcttatattatttatgtatccttgtggcctttaaatgaatccctgtttccattcttgtttacagggttctagatcaaagcctcatttttccatttttggaatgctttaacagcttctaatttttccctatattcacagtctttcttctctgatcaatcttgcgtattcttcccacaatgtctttcttaagcaactccaatcttttgctttaagatatgcttagatatgaacagacaggacttaagttaccactgatttgaaaacaatgaaaaaaagccaacatccttagaagtctagaaatgcaaatttcagcaaaaaaagagaggaagaaagacaaacttaactgtcacattcatactgtttctttcaagttcatatttaaggaagtgagagctctcaaacattgctggtatcctggtaaaatctctttgaaaaataattggcaaaatgtatggtgattgtcaaaaatgttgctactctgggccacgtgcggtggctcacacctgtaatcccagcactttgggaggccgaggtgggtggatcacaaggtcaggagttcaagaccagcttggccaatatggtgaaaccccatctctactaaaaatacaaaagttagctgggcatggtggtgggcacctgtagtcccagctactcaggaatctgaggcaggagaatcgcttgaactcgggaggtggaggttgcagtgagccaagatcatgccactgcactccagcctgggtgacagtgagactccatctc

SEQ ID NO: 2496 - protein, 5479 aa, Homo sapiens
MATSRGASRCPRDIANVMQRLQDEQEIVQKRTFTKWINSHLAKRKPPMVVDDLFEDMKDGVKLLALLEVLSGQKLPCEQGRRMKRIHAVANIGTALKFLEGRKSMHRGSPIKLVNINSTDIADGRPSIVLGLMWTIILYFQIEELTSNLPQLQSLSSSASSVDSIVSSETPSPPSKRKVTTKIQGNAKKALLKWVQYTAGKQTGIEVKDFGKSWRSGVAFHSVIHAIRPELVDLETVKGRSNRENLEDAFTIAETELGIPRLLDPEDVDVDKPDEKSIMTYVAQFLKHYPDIHNASTDGQEDDEILPGFPSFANSVQNFKREDRVIFKEMKVWIEQFERDLTRAQMVESNLQDKYQSFKHFRVQYEMKRKQIEHLIQPLHRDGKLSLDQALVKQSWDRVTSRLFDWHIQLDKSLPAPLGTIGAWLYRAEVREEITVQQVHEETANTIQRKLEQHKDLLQNTDAHKRAFHEIYRTRSVNGIPVPPDQLEDMAERFHFVSSTSELHLMKMEFLELKYRLLSLLVLAESKLKSWIIKYGRRESVEQLLQNYVSFIENSKFFEQYEVTYQILKQTAEMYVKADGSVEEAENVMKFMNETTAQWRNLSVEVRSVRSMLEEVISNWDRYGNTVASLQAWLEDAEKMLNQSENAKKDFFRNLPHWIQQHTAMNDAGNFLIETCDEMVSRDLKQQLLLLNGRWRELFMEVKQYAQADEMDRMKKEYTDCVVTLSAFATEAHKKLSEPLEVSFMNVKLLIQDLEDIEQRVPVMDAQYKIITKTAHLITKESPQEEGKEMFATMSKLKEQLTKVKECPLLYESQQLLIPLEELEKQMTSFYDSLGKINEIITVLEREAQSSALFKQKHQELLACQENCKKTLTLIEKGSQSVQKFVTLSNVLKHFDQTRLQRQIADIHVAFQSMVKKTGDWKKHVETNSRLMKKFEESRAELEKVLRIAQEGLEEKGDPEELLRRHTEFFSQLDQRVLNAFLKACDELTDILPEQEQQGLQEAVRKLHKQWKDLQGEAPYHLLHLKIDVEKNRFLASVEECRTELDRETKLMPQEGSEKIIKEHRVFFSDKGPHHLCEKRLQLIEELCVKLPVRDPVRDTPGTCHVTLKELRAAIDSYKLMEDPDKWKDYTSRFSEFSSWISTNETQLKGIKGEAIDTANHGEVKRAVEEIRNGVTKRGETLSWLKSRLKVLTEVSSENEAQKQGDELAKLSSSFKALVTLLSEVEKMLSNFGDCVQYKEIVKNSLEELISGSKEVQEQAEKILDTENLFEAQQLLLHHQQKTKRISAKKRDVQQQIAQAQQGEGGLPDRGHEELRKLESTLDGLERSRERQERRIQVTLRKWERFETNKETVVRYLFQTGSSHERFLSFSSLESLSSELEQTKEFSKRTESIAVQAENLVKEASEIPLGPQNKQLLQQQAKSIKEQVKKLEDTLEEDIKTMEMVKTKWDHFGSNFETLSVWITEKEKELNALETSSSAMDMQISQIKVTIQEIESKLSSIVGLEEEAQSFAQFVTTGESARIKAKLTQIRRYGEELREHAQCLEGTILGHLSQQQKFEENLRKIQQSVSEFEDKLAVPIKICSSATETYKVLQEHMDLCQALESLSSAITAFSASARKVVNRDSCVQEAAALQQQYEDILRRAKERQTALENLLAHWQRLEKELSSFLTWLERGEAKASSPEMDISADRVKVEGELQLIQALQNEVVSQASFYSKLLQLKESLFSVASKDDVKMMKLHLEQLDERWRDLPQIINKRINFLQSVVAEHQQFDELLLSFSVWIKLFLSELQTTSEISIMDHQVTRHKDHAAEVESKKGELQSLQGHLAKLGSLGRAEDLHLLQGKAEDCFQLFEEASQVVERRQLALSHLAEFLQSHASLSGILRQLRQTVEATNSMNKNESDLIEKDLNDALQNAKALESAAVSLDGILSKAQYHLKIGSSEQRTSCRATADQLCGEVERIQNLLGTKQSEADAVLKKAFQDQKEELLKSIEDIEERTDKERLKEPTRQALQQRLRVFNQLEDELNSHEHELCWLKDKAKQIAQKDVAFAPEVDREINRLEVTWDDTKRLIHENQGQCCGLIDLMREYQNLKSAVSKVLENASSVIVTRTTIKDQEDLKWAFSKHETAKNKMNYKQKDLDNFTSKGKHLLSELKKIHSSDFSLVKTDMESTVDKWLDVSEKLEENMDRLRVSLSIWDDVLSTRDEIEGWSNNCVPQMAENISNLDNHLRAEELLKEFESEVKNKALRLEELHSKVNDLKELTKNLETPPDLQFIEADLMQKLEHAKEITEVAKGTLKDFTAQSTQVEKFINDITTWFTKVEESLMNCAQNETCEALKKVKDIQKELQSQQSNISSTQENLNSLCRKYHSAELESLGRAMTGLIKKHEAVSQLCSKTQASLQESLEKHFSESMQEFQEWFLGAKAAAKESSDRTGDSKVLEAKLHDLQNILDSVSDGQSKLDAVTQEGQTLYAHLSKQIVSSIQEQITKANEEFQAFLKQCLKDKQALQDCASELGSFEDQHRKLNLWIHEMEERFNTENLGESKQHIPEKKNEVHKVEMFLGELLAARESLDKLSQRGQLLSEEGHGAGQEGRLCSQLLTSHQNLLRMTKEKLRSCQVQEHEALEEALQSMWFWVKAIQDRLACAESTLGSKDTLEKRLSQIQDILLMKGEGEVKLNMAIGKGEQALRSSNKEGQRVIQTQLETLKEVWADIMSSSVHAQSTLESVISQWNDYVERKNQLEQWMESVDQKIEHPLQPQPGLKEKFVLLDHLQSILSEAEDHTRALHRLIAKSRELYEKTEDESFKDTAQEELKTQFNDIMTVAKEKMRKVEEIVKDHLMYLDAVHEFTDWLHSAKEELHRWSDMSGDSSATQKKLSKIKELIDSREIGASRLSRVESLAPEVKQNTTASGCELMHTEMQALRADWKQWEDSVFQTQSCLENLVSQMALSEQEFSGQVAQLEQALEQFSALLKTWAQQLTLLEGKNTDEEIVECWHKGQEILDALQKAEPRTEDLKSQLNELCRFSRDLSTYSGKVSGLIKEYNCLCLQASKGCQNKEQILQQRFRKAFRDFQQWLVNAKITTAKCFDIPQNISEVSTSLQKIQEFLSESENGQHKLNMMLSKGELLSTLLTKEKAKGIQAKVTAAKEDWKNFHSNLHQKESALENLKIQMKDFEVSAEPIQDWLSKTEKMVHESSNRLYDLPAKRREQQKLQSVLEEIHCYEPQLNRLKEKAQQLWEGQAASKSFRHRVSQLSSQYLALSNLTKEKVSRLDRIVAEHNQFSLGIKELQDWMTDAIHMLDSYCHPTSDKSVLDSRTLKLEALLSVKQEKEIQMKMIVTRGESVLQNTSPEGIPTIQQQLQSVKDMWASLLSAGIRCKSQLEGALSKWTSYQDGVRQFSGWMDSMEANLNESQHAELRDKTTMLGKAKLLNEEVLSYSSLLETIEVKGAGMTEHYVTQLELQDLQERYRAIQERAKEAVTKSEKLVRLHQEYQRDLKAFEVWLGQEQEKLDQYSVLEGDAHTHETTLRDLQELQVHCAEGQALLNSVLHTREDVIPSGIPQAEDRALESLRQDWQAYQHRLSETRTQFNNVVNKLRLMEQKFQQVDEWLKTAEEKKWHEEVTAYRDEVEEVGARAQEILDESHVNSRMGCQATQLTSRYQALLLQVLEQIKFLEEEIQSLEESESSLSSYSDWYGSTHKNFKNVATKIDKVDTVMMGKKLKTLEVLLKDMEKGHSLLKSAREKGERAVKYLEEGEAERLRKEIHDHMEQLKELTSTVRKEHMTLEKGLHLAKEFSDKCKALTQWIAEYQEILHVPEEPKMELYEKKAQLSKYKSLQQTVLSHEPSVKSVREKGEALLELVQDVTLKDKIDQLQSDYQDLCSIGKAMMEEIAGFEDRLNNLQMKGDTLIGQCADHLQAKLKQNVHAHLQGTKDSYSAICSTAQRMYQSLEHELQKHVSRQDTLQQCQAWLSAVQPDLEPSPQPPLSRAEAIKQVKHFRALQEQARTYLDLLCSMCDLSNASVKTTAKDIQQTEQTIEQRLVQAQNLTQGWEEIKHLKSELWIYLQDADQQLQNMKRRHSELELNIAQNMVSQVKDFVKKLQSKQASVNTIIEKVNKLTKKEESPEHKEINHLNDQWLDLCRQSNNLCLQREEDLQRTRDYHDCMNVVEVFLEKFTTEWDNLARSDAESTAVHLEALKKLALQERKYAIEDLKDQKQKMIEHLNLDDKELVKEQTSHLEQRWFQLEDLIKRKIQVSVTNLEELNVVQSRFQELMEWAEEQQPNIAEALKQSPPPDMAQNLLMDHLAICSELEAKQMLLKSLIKDADRVMADLQERQVIQKALSDAQSHVNCLSDLVGQRRKYLNKALSEKTQFLMAVFQATSQIQQHERKIMFREHICLLPDDVSKQVKTCKSAQASLKTYQNEVTGLWAQGRELMKEVTEQEKSEVLGKLQELQSVYDSVLQKCSHRLQELEKNLVSRKHFKEDFDKACHWLKQADIVTFPEINLMNESTELHTQLAKYQNIQSPEYENLLLTLQRTGQTILPSLNEVDHSYLSEKLNALPRQFNVIVAKDKFYKVQEAILARKEYASLIELTTQSLSELEAQFLRMSKVPTDLAVEEALSLQDGCRAILDEVAGLGEAVDELNQKKEGFRSTGQPWQPDKMLHLVTLYHRLKRQTEQRVSLLEDTTSAYQEHEKMCQQLERQLKSVKEEQSKVNEETLPAEEKLKMYHSLAGSLQDSGIVLKRVTIHLEDLAPHLDPLAYEKARHQIQSWQGELKLLTSAIGETVTECESRMVQSIDFQTEMSRSLDWLRRVKAELSGPVYLDLNLQDIQEEIRKIQIHQEEVQSSLRIMNALSHKEKEKFTKAKELISADLEHSLAELSELDGDIQEALRTRQATLTEIYSQCQRYYQVFQAANDWLEDAQELLQLAGNGLDVESAEENLKSHMEFFSTEDQFHSNLEELHSLVATLDPLIKPTGKEDLEQKVASLELRSQRMSRDSGAQVDLLQRCTAQWHDYQKAREEVIELMNDTEKKLSEFSLLKTSSSHEAEEKLSEHKALVSVVNSFHEKIVEEKASQLEKTGNDASKATLSRSMTTVWQRWTRLRAVAQDQEKIDAVDEWTGFNNKVKKATEMIDQLQDKLPGSSAEKASKAELLTLLEYHDTFVLELEQQQSALGMLRQQTLSMLQDGAAPTPGEEPPLMQEITAMQDRCLNMQEKVKTNGKLVKQELKDREMVETQINSVKCWVQETKEYLGNPTIEIDAQLEELQILLTEATNHRQNIEKMAEEQKEKYLGTILPSELSLQLAEVDLKIRDQIQDKIKEVEQSKATSQELSRQIQKLAKDLTTILTKLKAKTDNVVQAKTDQKVLGEELDGCNSKLMELDAAVQKFLEQNGQLGKPLAKKIGKLTELHQQTIRQAENRLSKLNQAASHLEEYNEMLELILKWIEKAKVLAHGTIAWNSASQLREQYILHQVTLGKIIFKK

SEQ ID NO: 2497 - DNA, 5646 bp, Homo sapiens
cggccgccggccgcagcgggctgagattgttgtcctctgtcaccagggcggctgggctcccgcagtcctgcagaccgcgcccgatcccggcgacagggcgggcggacagccgcgcatccccggggtcccgccgagcctgggcgcagagagccgggaggaagcgttcgctcgcttcgccttgctgctgggaaactgaacgaggccgagagagaaggttcttgagttcatgtaagaggacagtcttaaaacggaagaagaaaaagaagcagttcagtctttgggagagctgcctccttgttgagtgctgcaaaggcctggaattcatttatgacagaatagatctagaaaagtccaagcatgttttctagagtggtgtagccctgtgctgcctccagtgaagagtctcttggtgttggcttcgtgcttccggagggaccatggcaacctccagaggggcctcccggtgtcctcgggatatcgccaatgtgatgcagaggctgcaagatgagcaagagatagtacaaaaacgaactttcacaaaatggatcaactctcatctggccaagcggaaacctccaatggtggtggacgatctttttgaagacatgaaagatggtgttaaactgcttgcccttctggaggtcctgtctgggcagaaactgccttgtgaacaaggacgccggatgaagcgaatccatgctgtggctaacattggcacggcactcaagttcctcgaaggaagaaagtccatgcacagaggatcaccgattaaattagtcaacattaactccaccgatatagctgatggccgaccctcaatagttcttggattgatgtggaccattattctatatttccagattgaagagttgaccagcaacctgccccagctccagtctttgtccagcagcgcatcctccgtggacagcatagttagctctgagactcccagcccaccaagtaaacggaaggtgaccaccaagatccaaggaaatgctaagaaggctttattaaagtgggttcagtacacagctggcaagcagactggaatagaagtaaaagattttgggaagagttggagaagcggggttgcctttcattcagttattcatgccattcgaccggaattggtggacttggagacagtgaaaggcagatccaaccgagaaaatttggaggatgctttcactatcgccgaaacagaactggggatcccaagactgctagatcctgaagacgttgatgtggataaaccagatgagaaatctattatgacctatgtagcccagtttctgaaacattatcctgacatccacaatgcaagcactgatgggcaagaggatgatgaaatacttccaggtttcccatcttttgcaaattctgtacaaaattttaagagagaagacagagtaatttttaaggaaatgaaagtttggatagaacaatttgagagagatttgacaagagcacagatggtggaatcaaatttacaggataaatatcagtcatttaagcacttcagagttcaatatgaaatgaagaggaaacagattgaacatttaatacaaccattacacagagacggtaaattgtcacttgaccaagcattggtaaaacaatcttgggatagagtgacctccaggctctttgactggcatatacagcttgataaatctcttcctgcacctctgggcaccataggtgcctggctgtacagagcggaggtggccctgagagaggaaataaccgttcaacaggtccacgaggaaacagcaaacacgatacaacggaaacttgagcaacataaggatctgcttcaaaacacggatgcccacaaaagagcattccatgaaatctaccggaccaggtctgttaacgggattccagtgccacctgatcaattagaggacatggccgagaggtttcattttgtttcctccacatcagagctacacctaatgaaaatggaatttttagaattaaagtaccgtctgctctcactgctggttcttgcagagtcaaagctgaagtcttggatcattaagtacgggaggagagagtcagtggagcagcttctacaaaactacgtgtcttttatagaaaatagcaagttctttgaacaatatgaggtgacataccagatcttgaaacagacagctgagatgtatgtcaaagcagatggttcagtggaagaagctgagaatgtgatgaaattcatgaatgaaaccaccgctcagtggaggaatctctcagtagaagtgaggagtgtgaggagcatgctggaagaagtgatctctaactgggatcgctatggcaatacagtggctagtctgcaagcctggctagaggatgctgaaaaaatgctcaatcaatcagaaaatgccaaaaaggatttttttcgaaatttacctcattggattcagcagcatactgccatgaacgatgctggcaattttctaattgaaacctgtgatgagatggtttcccgtgacctgaagcagcaattactgttgctaaatgggcggtggagggagttgtttatggaagtcaagcaatatgctcaagctgatgagatggacagaatgaagaaggaatacacagactgtgttgttaccctgtctgcttttgcaacggaagcccataagaaactttctgaacccttagaagtctcttttatgaatgtcaagctattaattcaagacttggaggatattgagcagagggtgcctgtgatggatgcccaatacaagataattacaaagacagcacacctcattaccaaagaaagcccccaagaagaaggaaaagaaatgtttgcgaccatgtcaaagctcaaagagcagctaaccaaggtcaaagaatgttactccccactcctttatgagtctcagcagctgttgattccgttggaggaattagaaaagcagatgacgtccttttatgactcacttgggaaaatcaatgaaattatcacagttcttgagcgtgaggcacaatcgagtgccctttttaaacaaaaacatcaggaactgttagcttgtcaagaaaactgtaagaaaaccttgacacttattgagaaaggcagtcaaagtgttcaaaagtttgtgaccttgagcaacgtgttaaagcattttgatcagacgaggctacaaagacagattgcagatattcatgttgcttttcagagtatggtaaagaaaactggagattggaagaagcatgtggaaaccaacagtcgcttgatgaagaagtttgaggagtctcgagcagagttggagaaggtactgcggattgctcaggagggcctggaggaaaagggggatccagaggagctcctgcggagacacactgagtttttcagtcagctggatcagagggtgctcaatgctttcctgaaagcttgtgatgaactcaccgacatccttccagagcaggagcagcaggggctgcaggaagctgttcgaaagctccacaaacaatggaaggatcttcaaggagaagccccttatcatttgcttcatctgaagattgatgtggagaagaataggttcttagcctctgtagaagaatgcagaactgagctggatcgagagaccaagctgatgccccaggaaggcagtgaaaagataattaaagagcacagggttttcttcagtgacaaaggtcctcatcatctctgtgagaaaaggttacagctcatcgaggaactctgtgtgaaactcccagtgcgggacccagtaagggacacacctggaacctgtcacgtgactctcaaagagctcagagctgccattgacagcacctacaggaagctcatggaagacccagacaagtggaaggactacactagcagattctctgagttctcatcttggatatctacaaatgagacacaattaaaggggatcaagggtgaggccatcgatactgccaaccacggagaggttaaacgtgccgttgaagagatcagaaatggtgttaccaaaaggggtgagaccctcagctggctgaaatccaggctgaaagttttgacagaagtttcttctgagaatgaagcccaaaagcagggagatgagctggcaaaattatccagctctttcaaggctcttgtgacgctgctgtcagaggttgaaaagatgctaagcaattttggggactgtgtccagtacaaagaaatagtcaaaaattctctcgaagaattaatttctggctctaaagaagtccaggaacaagctgagaagatcttggatactgaaaatctgtttgaagcacagcagttacttcttcatcaccagcaaaagacaaagcggatctcagcaaagaagagagatgtgcagcagcagatcgcgcaggcgcagcagggagaaggggggctgcctgaccgaggccacgaggagctgcggaagctggagagcacactggatggcctggagcgcagccgggagaggcaggaacgccgcatccaggtcacattaagaaaatgggagcgatttgaaacaaacaaagaaacagtagtaagatacctttttcaaacaggttccagtcatgaacgcttcttgagttttagcagtttggaaagtttatcttcagaactggaacaaacaaaggagttttctaaacggacagaaagtattgcagtccaggctgagaaccttgtaaaggaagcttcagagataccgcttgggccccaaaataagcagctgcttcaacagcaggccaagtcaatcaaagaacaagtcaaaaaattagaagacacgcttgaagaagatattaaaaccatggaaatggtgaaaaccaagtgggatcattttggcagtaattttgagactctgtccgtctggataactgagaaagaaaaagaactcaatgccttggaaacttcgtcatctgccatggacatgcaaatcagccaaattaaggtcacaattcaggaaatagaaagtaagctcagcagcattgtaggattagaagaagaagcccagtcttttgctcagtttgttaccactggagaatctgctcgaattaaagccaagttgacacaaataagaagatacggggaagagcttcgagagcatgcacagtgtctggaaggaacaatcctgggacatttatctcagcagcaaaagtttgaagagaaccttagaaagatccagcaatctgtgtctgaatttgaagataaacttgctgttccaattaaaatatgttcttcagctacagaaacatacaaagttcttcaagaacatatggatctctgccaggccctggagtcactgagcagcgcgatcactgccttctcagccagtgccaggaaggttgtgaacagagattcctgtgttcaggaggctgcggctctacagcagcaatacgaggacatcctaaggagggcgaaggagagacagacggcgctggagaatctgctggcccactggcagaggctagagaaagaactatcatcctttttgacctggttagagcggggtgaagctaaagccagttccccagaaatggacatttctgcagacagagtcaaagtggaaggtgaacttcagttaatacaggcaagttcaaggaagtgtgaggaaggaaaaaataaaatgctttttgttacagttacattatttaaaataataaaataaataaacttgt

SEQ ID NO: 2498 - protein, 1726 aa, Homo sapiens
MATSRGASRCPRDIANVMQRLQDEQEIVQKRTFTKWINSHLAKRKPPMVVDDLFEDMKDGVKLLALLEVLSGQKLPCEQGRRMKRIHAVANIGTALKFLEGRKSMHRGSPIKLVNINSTDIADGRPSIVLGLMWTIILYFQIEELTSNLPQLQSLSSSASSVDSIVSSETPSPPSKRKVTTKIQGNAKKALLKWVQYTAGKQTGIEVKDFGKSWRSGVAFHSVIHAIRPELVDLETVKGRSNRENLEDAFTIAETELGIPRLLDPEDVDVDKPDEKSIMTYVAQFLKHYPDIHNASTDGQEDDEILPGFPSFANSVQNFKREDRVIFKEMKVWIEQFERDLTRAQMVESNLQDKYQSFKHFRVQYEMKRKQIEHLIQPLHRDGKLSLDQALVKQSWDRVTSRLFDWHIQLDKSLPAPLGTIGAWLYRAEVREEITVQQVHEETANTIQRKLEQHKDLLQNTDAHKRAFHEIYRTRSVNGIPVPPDQLEDMAERFHFVSSTSELHLMKMEFLELKYRLLSLLVLAESKLKSWIIKYGRRESVEQLLQNYVSFIENSKFFEQYEVTYQILKQTAEMYVKADGSVEEAENVMKFMNETTAQWRNLSVEVRSVRSMLEEVISNWDRYGNTVASLQAWLEDAEKMLNQSENAKKDFFRNLPHWIQQHTAMNDAGNFLIETCDEMVSRDLKQQLLLLNGRWRELFMEVKQYAQADEMDRMKKEYTDCVVTLSAFATEAHKKLSEPLEVSFMNVKLLIQDLEDIEQRVPVMDAQYKIITKTAHLITKESPQEEGKEMFATMSKLKEQLTKVKECPLLYESQQLLIPLEELEKQMTSFYDSLGKINEIITVLEREAQSSALFKQKHQELLACQENCKKTLTLIEKGSQSVQKFVTLSNVLKHFDQTRLQRQIADIHVAFQSMVKKTGDWKKHVETNSRLMKKFEESRAELEKVLRIAQEGLEEKGDPEELLRRHTEFFSQLDQRVLNAFLKACDELTDILPEQEQQGLQEAVRKLHKQWKDLQGEAPYHLLHLKIDVEKNRFLASVEECRTELDRETKLMPQEGSEKIIKEHRVFFSDKGPHHLCEKRLQLIEELCVKLPVRDPVRDTPGTCHVTLKELRAAIDSYKLMEDPDKWKDYTSRFSEFSSWISTNETQLKGIKGEAIDTANHGEVKRAVEEIRNGVTKRGETLSWLKSRLKVLTEVSSENEAQKQGDELAKLSSSFKALVTLLSEVEKMLSNFGDCVQYKEIVKNSLEELISGSKEVQEQAEKILDTENLFEAQQLLLHHQQKTKRISAKKRDVQQQIAQAQQGEGGLPDRGHEELRKLESTLDGLERSRERQERRIQVTLRKWERFETNKETVVRYLFQTGSSHERFLSFSSLESLSSELEQTKEFSKRTESIAVQAENLVKEASEIPLGPQNKQLLQQQAKSIKEQVKKLEDTLEEDIKTMEMVKTKWDHFGSNFETLSVWITEKEKELNALETSSSAMDMQISQIKVTIQEIESKLSSIVGLEEEAQSFAQFVTTGESARIKAKLTQIRRYGEELREHAQCLEGTILGHLSQQQKFEENLRKIQQSVSEFEDKLAVPIKICSSATETYKVLQEHMDLCQALESLSSAITAFSASARKVVNRDSCVQEAAALQQQYEDILRRAKERQTALENLLAHWQRLEKELSSFLTWLERGEAKASSPEMDISADRVKVEGELQLIQASSRKCEEGKNKMLFVTVTLFKIIK

SEQ ID NO: 2499 - DNA, 27435 bp, Homo sapiens
cggccgccggccgcagcgggctgagattgttgtcctctgtcaccagggcggctgggctcccgcagtcctgcagaccgcgcccgatcccggcgacagggcgggcggacagccgcgcatccccggggtcccgccgagcctgggcgcagagagccgggaggaagcgttcgctcgcttcgccttgctgctgggaaactgaacgaggccgagagagaaggttcttgagttcatgtaagaggacagtcttaaaacggaagaagaaaaagaagcagttcagtctttgggagagctgcctccttgttgagtgctgcaaaggcctggaattcatttatgacagaatagatctagaaaagtccaagcatgttttctagagtggtgtagccctgtgctgcctccagtgaagagtctcttggtgttggcttcgtgcttccggagggaccatggcaacctccagaggggcctcccggtgtcctcgggatatcgccaatgtgatgcagaggctgcaagatgagcaagagatagtacaaaaacgaactttcacaaaatggatcaactctcatctggccaagcggaaacctccaatggtggtggacgatctttttgaagacatgaaagatggtgttaaactgcttgcccttctggaggtcctgtctgggcagaaactgccttgtgaacaaggacgccggatgaagcgaatccatgctgtggctaacattggcacggcactcaagttcctcgaaggaagaaagtccatgcacagaggatcaccgattaaattagtcaacattaactccaccgatatagctgatggccgaccctcaatagttcttggattgatgtggaccattattctatatttccagattgaagagttgaccagcaacctgccccagctccagtctttgtccagcagcgcatcctccgtggacagcatagttagctctgagactcccagcccaccaagtaaacggaaggtgaccaccaagatccaaggaaatgctaagaaggctttattaaagtgggttcagtacacagctggcaagcagactggaatagaagtaaaagattttgggaagagttggagaagcggggttgcctttcattcagttattcatgccattcgaccggaattggtggacttggagacagtgaaaggcagatccaaccgagaaaatttggaggatgctttcactatcgccgaaacagaactggggatcccaagactgctagatcctgaagacgttgatgtggataaaccagatgagaaatctattatgacctatgtagcccagtttctgaaacattatcctgacatccacaatgcaagcactgatgggcaagaggatgatgaaatacttccaggtttcccatcttttgcaaattctgtacaaaattttaagagagaagacagagtaatttttaaggaaatgaaagtttggatagaacaatttgagagagatttgacaagagcacagatggtggaatcaaatttacaggataaatatcagtcatttaagcacttcagagttcaatatgaaatgaagaggaaacagattgaacatttaatacaaccattacacagagacggtaaattgtcacttgaccaagcattggtaaaacaatcttgggatagagtgacctccaggctctttgactggcatatacagcttgataaatctcttcctgcacctctgggcaccataggtgcctggctgtacagagcggaggtggccctgagagaggaaataaccgttcaacaggtccacgaggaaacagcaaacacgatacaacggaaacttgagcaacataaggatctgcttcaaaacacggatgcccacaaaagagcattccatgaaatctaccggaccaggtctgttaacgggattccagtgccacctgatcaattagaggacatggccgagaggtttcattttgtttcctccacatcagagctacacctaatgaaaatggaatttttagaattaaagtaccgtctgctctcactgctggttcttgcagagtcaaagctgaagtcttggatcattaagtacgggaggagagagtcagtggagcagcttctacaaaactacgtgtcttttatagaaaatagcaagttctttgaacaatatgaggtgacataccagatcttgaaacagacagctgagatgtatgtcaaagcagatggttcagtggaagaagctgagaatgtgatgaaattcatgaatgaaaccaccgctcagtggaggaatctctcagtagaagtgaggagtgtgaggagcatgctggaagaagtgatctctaactgggatcgctatggcaatacagtggctagtctgcaagcctggctagaggatgctgaaaaaatgctcaatcaatcagaaaatgccaaaaaggatttttttcgaaatttacctcattggattcagcagcatactgccatgaacgatgctggcaattttctaattgaaacctgtgatgagatggtttcccgtgacctgaagcagcaattactgttgctaaatgggcggtggagggagttgtttatggaagtcaagcaatatgctcaagctgatgagatggacagaatgaagaaggaatacacagactgtgttgttaccctgtctgcttttgcaacggaagcccataagaaactttctgaacccttagaagtctcttttatgaatgtcaagctattaattcaagacttggaggatattgagcagagggtgcctgtgatggatgcccaatacaagataattacaaagacagcacacctcattaccaaagaaagcccccaagaagaaggaaaagaaatgtttgcgaccatgtcaaagctcaaagagcagctaaccaaggtcaaagaatgttactccccactcctttatgagtctcagcagctgttgattccgttggaggaattagaaaagcagatgacgtccttttatgactcacttgggaaaatcaatgaaattatcacagttcttgagcgtgaggcacaatcgagtgccctttttaaacaaaaacatcaggaactgttagcttgtcaagaaaactgtaagaaaaccttgacacttattgagaaaggcagtcaaagtgttcaaaagtttgtgaccttgagcaacgtgttaaagcattttgatcagacgaggctacaaagacagattgcagatattcatgttgcttttcagagtatggtaaagaaaactggagattggaagaagcatgtggaaaccaacagtcgcttgatgaagaagtttgaggagtctcgagcagagttggagaaggtactgcggattgctcaggagggcctggaggaaaagggggatccagaggagctcctgcggagacacactgagtttttcagtcagctggatcagagggtgctcaatgctttcctgaaagcttgtgatgaactcaccgacatccttccagagcaggagcagcaggggctgcaggaagctgttcgaaagctccacaaacaatggaaggatcttcaaggagaagccccttatcatttgcttcatctgaagattgatgtggagaagaataggttcttagcctctgtagaagaatgcagaactgagctggatcgagagaccaagctgatgccccaggaaggcagtgaaaagataattaaagagcacagggttttcttcagtgacaaaggtcctcatcatctctgtgagaaaaggttacagctcatcgaggaactctgtgtgaaactcccagtgcgggacccagtaagggacacacctggaacctgtcacgtgactctcaaagagctcagagctgccattgacagcacctacaggaagctcatggaagacccagacaagtggaaggactacactagcagattctctgagttctcatcttggatatctacaaatgagacacaattaaaggggatcaagggtgaggccatcgatactgccaaccacggagaggttaaacgtgccgttgaagagatcagaaatggtgttaccaaaaggggtgagaccctcagctggctgaaatccaggctgaaagttttgacagaagtttcttctgagaatgaagcccaaaagcagggagatgagctggcaaaattatccagctctttcaaggctcttgtgacgctgctgtcagaggttgaaaagatgctaagcaattttggggactgtgtccagtacaaagaaatagtcaaaaattctctcgaagaattaatttctggctctaaagaagtccaggaacaagctgagaagatcttggatactgaaaatctgtttgaagcacagcagttacttcttcatcaccagcaaaagacaaagcggatctcagcaaagaagagagatgtgcagcagcagatcgcgcaggcgcagcagggagaaggggggctgcctgaccgaggccacgaggagctgcggaagctggagagcacactggatggcctggagcgcagccgggagaggcaggaacgccgcatccaggtcacattaagaaaatgggagcgatttgaaacaaacaaagaaacagtagtaagatacctttttcaaacaggttccagtcatgaacgcttcttgagttttagcagtttggaaagtttatcttcagaactggaacaaacaaaggagttttctaaacggacagaaagtattgcagtccaggctgagaaccttgtaaaggaagcttcagagataccgcttgggccccaaaataagcagctgcttcaacagcaggccaagtcaatcaaagaacaagtcaaaaaattagaagacacgcttgaagaagatattaaaaccatggaaatggtgaaaaccaagtgggatcattttggcagtaattttgagactctgtccgtctggataactgagaaagaaaaagaactcaatgccttggaaacttcgtcatctgccatggacatgcaaatcagccaaattaaggtcacaattcaggaaatagaaagtaagctcagcagcattgtaggattagaagaagaagcccagtcttttgctcagtttgttaccactggagaatctgctcgaattaaagccaagttgacacaaataagaagatacggggaagagcttcgagagcatgcacagtgtctggaaggaacaatcctgggacatttatctcagcagcaaaagtttgaagagaaccttagaaagatccagcaatctgtgtctgaatttgaagataaacttgctgttccaattaaaatatgttcttcagctacagaaacatacaaagttcttcaagaacatatggatctctgccaggccctggagtcactgagcagcgcgatcactgccttctcagccagtgccaggaaggttgtgaacagagattcctgtgttcaggaggctgcggctctacagcagcaatacgaggacatcctaaggagggcgaaggagagacagacggcgctggagaatctgctggcccactggcagaggctagagaaagaactatcatcctttttgacctggttagagcggggtgaagctaaagccagttccccagaaatggacatttctgcagacagagtcaaagtggaaggtgaacttcagttaatacaggcactgcaaaatgaagttgtatcccaggcctcattctatagcaaacttttgcaattgaaggaatcattgttctcagtagcctccaaagatgatgtgaaaatgatgaaactacatttggagcagttggatgagagatggagagatttaccacagatcattaacaaaaggattaattttcttcagtctgtggttgctgaacaccagcaatttgatgagctgctgctttccttttctgtctggattaaactgtttctcagtgaattacaaactacctctgagattagcataatggaccatcaagtagcccttactcggcataaggaccacgcagcagaagtagagagcaaaaagggcgaattgcagagtctgcagggtcacttagcaaagttgggttctctgggccgtgctgaggacctccacctcctgcagggaaaggctgaggactgcttccagctgtttgaggaggccagccaggttgtggagaggcggcagcttgccctgtcccatttggcagaattcctccagagccatgcctctctgtccggcattctccgccagctgaggcaaacagtggaagcaaccaacagtatgaataagaacgagtctgatttgatagaaaaggacctcaatgatgctcttcaaaatgctaaagcattagaatctgctgccgtcagtctggatggcattctttccaaagcccaataccatctgaaaatcgggagctctgagcaaaggacttcctgcagagccacggctgatcagctctgtggagaggtagagaggatccagaaccttctgggaaccaagcagagtgaggcagatgctctggcagtgttgaaaaaagcattccaagaccagaaagaggagcttctgaaaagcattgaggacattgaagaaaggactgacaaagagcgattgaaagaacctacccgccaagctcttcagcagaggttaagagtgtttaatcagctagaagatgaattgaattctcacgagcatgaactatgttggttgaaagacaaagccaagcaaattgcccagaaagatgtagcttttgcacctgaagttgacagggagataaaccgcttagaggtcacctgggatgataccaaaagactaattcatgaaaatcagggtcagtgctgtggacttattgacttaatgagagaatatcagaacctgaaatcagctgtatctaaagtcttagaaaatgccagcagtgtgattgtaaccagaactaccataaaagatcaggaggatcttaaatgggctttttccaagcatgaaactgccaagaacaaaatgaattacaaacagaaagacttggataactttaccagcaaaggaaaacacttgttatctgagctgaagaaaattcacagtagtgatttcagcttggtgaaaacagacatggagagcaccgtggacaaatggctggatgtatcagagaaacttgaagaaaacatggataggctgagagtaagcctgtccatttgggatgatgtactgtcaactagagatgagattgagggatggtcaaacaactgcgttccacagatggcagaaaacatcagcaacctggataaccacctcagagctgaagaactgcttaaagaatttgagtctgaagttaaaaacaaagcattgagattggaagaactgcattccaaagttaatgatctgaaagaattaactaaaaatctagaaacaccgccagaccttcagtttatagaagcagacttaatgcagaaactggagcatgccaaagaaataactgaagtagcaaaaggaaccctgaaggatttcacggctcaaagtacacaagtggagaagtttattaatgacataacaacatggttcacaaaagtggaagaatcgttgatgaactgtgcccaaaatgagacttgtgaagcattgaaaaaagtcaaggatatacaaaaagaacttcaaagtcaacaaagcaacatcagctctacccaagaaaatctcaatagcttgtgccgcaagtaccactcagctgagttggagagcctgggccgtgcaatgactggtctgataaagaaacatgaagccgtgagccagttgtgctccaaaacccaggccagcctgcaggaatctctggaaaaacacttcagtgagtctatgcaggaattccaagaatggtttttgggagcaaaggcagcagcaaaagaatcatcagatcgcaccggtgacagcaaagttctagaagcaaagctccatgatcttcagaacattttggactcagtcagtgatgggcagagcaaacttgatgcagtgactcaagaaggacaaactttgtatgcacatttgtctaaacaaattgtcagtagcattcaagaacaaatcacaaaggccaatgaagagtttcaagcatttctgaaacaatgccttaaagataagcaggctcttcaagactgtgcttcagaacttggaagctttgaagatcagcacagaaaactgaacttatggatccatgaaatggaagaaaggttcaatacggaaaacttgggagagagtaaacagcacattcctgagaagaaaaatgaagttcataaagttgaaatgtttttgggagaactgctggctgcaagagagtctcttgataagctttcccagagagggcagcttctgagtgaagaaggccacggtgctgggcaggagggccgcctgtgttcccagctcctcacaagccaccagaacctacttagaatgaccaaagagaaactccggagctgccaggtggcccttcaggagcacgaagccctggaggaagcactgcaaagcatgtggttctgggtgaaggccattcaggacagactggcctgtgcagagagcactcttgggagcaaagacaccctggagaaacggctgtcacaaatacaggatattctcctgatgaaaggtgaaggggaagttaagttgaatatggccattggcaagggggaacaggccttgagaagtagcaacaaagaaggtcagagggtgattcagactcagttagagacccttaaagaagtgtgggctgacatcatgagctcctccgtccacgctcaaagcactttagagtctgtgattagccaatggaatgactatgtagagaggaaaaaccagttggagcagtggatggaatcagtggatcaaaaaatagaacatcccttacaaccacagccaggtctgaaagagaagttcgtcctgcttgaccacctccagtccatcctgtctgaggcagaagatcacacgagagcccttcaccgtctaattgcgaagtccagggagctctacgaaaagacagaggatgagtctttcaaggacacagctcaagaggagctgaaaacacagtttaatgatataatgactgttgccaaggaaaaaatgaggaaagtggaagagattgtgaaagatcatctaatgtatttagatgcggtccacgagttcacagattggctccattcagcaaaggaagaacttcaccggtggtcagatatgtctggagattcatcagccacccagaaaaagttatcaaaaattaaggagctgatagattccagagagattggtgcaagccgtctcagcagagtggagtcgctggctcccgaagtgaaacagaacacaactgccagtgggtgtgagctcatgcacacggagatgcaggccctgcgtgccgactggaagcagtgggaagacagtgtattccaaacgcagagctgtttggagaacctggtcagccagatggccctttcggagcaggaattctcaggccaagtggctcaactggagcaggccctggaacagttcagtgcccttctgaaaacctgggctcagcagttaaccctcctggaaggcaagaacacggatgaggagatagtggaatgctggcacaaaggacaagagatactggatgctttgcaaaaagcagagcctagaacagaggatctcaagtctcagctgaatgaactttgtcgattttccagagacctgagtacctacagtggaaaagtttctggcttgattaaagagtataattgtctttgtttgcaagcatccaagggctgccagaataaagaacagattttacagcaaagatttcgaaaggccttcagggatttccagcagtggttggttaatgcaaaaatcactaccgccaagtgttttgatatacctcaaaatataagtgaagtttcaactagtcttcagaaaatacaggagtttttgtcagaaagtgaaaatggacagcacaagctaaacatgatgctgtctaaaggggaacttctgagtaccctgctgaccaaagagaaagcgaaagggatccaggccaaagttacagctgcaaaagaagattggaaaaattttcattcaaatctccaccaaaaagaatctgctctagagaatctaaagatccaaatgaaggactttgaagtaagtgctgagcctatccaggactggctgagtaaaactgagaagatggtccatgaaagcagcaatcgcctctatgatctgccagcaaagaggagggagcagcagaagctccagtctgtccttgaggaaatacactgctacgagcctcagctcaacaggctgaaagagaaagctcagcagctgtgggaaggacaagctgccagcaagagctttaggcacagagtgtcgcagctgtcttctcagtatctagcgctaagcaatttaacaaaggagaaagtgtcaagactggatagaatcgttgcagaacacaatcagttctctcttgggattaaagaattacaagactggatgacggatgcgattcacatgctggattcatactgccacccgacatccgacaaaagtgtgctggacagcaggacgctcaagctcgaggctctattatcagtcaaacaggaaaaagagattcagatgaaaatgatagtgaccaggggagaatctgtccttcagaatacttctccagaaggcattcccactattcagcagcagctgcagagtgtgaaggatatgtgggcatcccttttgtctgcagggattcgttgtaaaagccaactcgaaggagctctctccaagtggacaagttatcaggatggcgttcgacagttctccggttggatggatagtatggaagccaacctgaatgaatcagaaaggcagcatgcggagctgcgggataaaacaacgatgctcggaaaagccaagttattaaatgaagaagtgctgagttacagcagcttgctggagaccatcgaagtcaaaggggctggcatgacagaacactatgtcacccagctagaactccaggatctacaggaacgatacagagccatccaagagagggccaaggaagccgtaaccaagtctgaaaaacttgtccgcctgcaccaagagtatcagagagacctaaaggcatttgaagtttggttggggcaagaacaagaaaagctcgaccagtattcagttcttgaaggtgatgcccacactcatgagacaacattgcgtgatcttcaggagctacaggtacactgtgcagaggggcaggccctgttgaactcagtgctgcacaccagagaggatgtgatcccatcaggtatcccacaggcagaggaccgggctttagagtctctccggcaagactggcaggcttaccagcacaggctgtccgagactcgaactcagttcaataacgtggtgaacaaattgaggctaatggagcaaaagtttcagcaagtagatgaatggctcaaaacagcagaggagaaaaagtggcacgaagaagtgactgcatacagagatgaagttgaggaagtgggagctagagctcaggagatactggacgagagccacgtgaacagcagaatgggttgccaggccacccagctgacttccagataccaggccctgcttctccaagtgctggaacaaataaaattcctggaggaggagattcagagtttggaggaatcagaatcatccctcagttcctattctgattggtatggctctactcataaaaacttcaagaatgtggctaccaagattgacaaagtagatacagtaatgatggggaagaaattgaagacgttggaggttttgctcaaagacatggagaaaggtcacagtttgctgaaatcagcccgggagaaaggagagagggctgttaaatacttggaggaaggcgaggcagagaggttaagaaaggagattcatgatcacatggagcagttgaaggaactgaccagcactgtccggaaagaacacatgacgctggaaaaaggtcttcatttagcaaaggaattctcagataaatgcaaagcactgacacagtggatagcagaataccaggaaattctacatgttcctgaagaacccaaaatggaattatatgagaaaaaagctcagttatctaaatacaagtcacttcaacaaacggtgctgtcccatgaaccatcagtaaagtcagtgagagagaagggtgaagctcttttggaactggtgcaggacgtcactttaaaggacaaaatagatcaacttcaaagtgattaccaggacctgtgcagcataggaaaggcaatgatggaagaaattgctggttttgaagaccgtttgaacaatcttcaaatgaaaggtgatactttgattggccaatgtgcagaccacctgcaagcgaaacttaaacaaaacgtgcatgctcatctgcagggcacaaaggacagctactcagcgatctgcagcacagctcagaggatgtaccagagtttggaacacgaacttcagaagcacgtcagccgacaagacaccctgcagcagtgccaggcctggctttctgcagtccagccggatttagagccaagtcctcaaccacctcttagtagggcagaagccattaagcaggtcaaacacttcagagctttgcaagagcaggcaaggacctacctagatctcctttgctccatgtgtgacctgtcaaatgcttcggtgaaaaccacagcaaaagacattcaacaaacagagcaaacgattgaacaaaggcttgtccaggcccagaacttaactcagggctgggaagagatcaagcacctgaagtctgagctctggatttacctgcaagatgctgatcagcaactgcagaacatgaagaggaggcactctgagctggagctgaacattgcacagaacatggtttcacaagttaaggattttgttaagaaactacagagcaaacaggcatccgtgaacaccataatagaaaaggtgaataagttaacaaagaaggaggaatcgcctgaacacaaggaaataaatcatttaaatgatcagtggctcgatttgtgccgtcagtctaacaacctgtgcttgcaaagggaagaggatcttcagagaacaagagattaccatgactgtatgaatgttgttgaagtgttcctagaaaaatttactacagaatgggataacttggccagatctgatgcagagagtacagctgtccacctggaagctttgaaaaagttagcattggcattgcaggagagaaagtatgctattgaagatctgaaagatcaaaagcagaaaatgatagagcatctgaatttagatgacaaggagttagtcaaagaacagacgagtcatttagagcaacgttggtttcagcttgaggacctcattaaaaggaaaatccaagtgtcagtcaccaacttggaggagttaaatgtggtgcagtccagatttcaggagctaatggagtgggcagaagagcaacaacccaacatcgccgaggcccttaagcagagccctcctccagatatggctcagaaccttctcatggatcacctggccatctgcagtgaactggaggccaagcagatgctcctgaaatcgcttataaaggacgcagacagggtcatggcagatcttggtctcaatgagcgacaggtcatccagaaggctctctctgatgcacaaagccacgtgaattgtctcagtgacttagtgggccagcgaagaaagtacttaaacaaagccttgtccgagaaaacccagtttctcatggcagtgttccaggccaccagccaaattcagcaacatgagcgaaagataatgttccgtgaacacatctgtctgttaccagatgatgtgagcaaacaagtcaaaacatgtaagagtgcacaagccagcctcaagacttaccaaaatgaagtcactggactttgggcccagggtcgcgaactaatgaaggaagtcacagagcaggaaaagagtgaagtgctggggaagcttcaggaattgcagagtgtctatgacagtgttttacaaaagtgcagtcaccggttacaagaactagagaagaatttggtttctaggaagcattttaaggaagattttgataaagcttgccactggctaaaacaagcagatattgttacatttcctgaaatcaacctaatgaatgagagtactgagcttcatacacaactggctaaataccaaaacattcttgaacaatctccagaatatgaaaatcttctacttacgctgcagagaactgggcagaccatattaccatcgctgaatgaagtcgatcattcctacctcagtgaaaagctaaatgctttgcctcgacaatttaatgtaattgttgccttggctaaagacaagttctataaagtccaggaagcaattcttgctcggaaggaatatgcttccttgattgagttgacaacccagtctctgagtgaacttgaagcccaattcttgaggatgagcaaagttcccaccgacctggccgttgaggaggctctttctctgcaagatggttgcagagccattctggacgaggtggcgggccttggggaggcggtggatgaactgaaccagaaaaaagaaggttttcgcagcacaggtcagccttggcagccagacaagatgctgcaccttgtcaccttatatcacaggctgaagcgacaaacagaacagagggttagcttattagaagacaccaccagtgcttaccaagaacacgagaagatgtgccaacagctggagagacaactgaagtctgtaaaagaggagcagtccaaagtgaatgaggaaacgctgcctgcagaggagaagctcaaaatgtatcactccctggcaggaagtctccaggactcagggattgtactgaaacgagtaaccatacatcttgaagatcttgccccacaccttgaccccttggcttatgagaaagccaggcatcagatccagtcctggcaaggggagttaaaactgttgacttctgccattggtgagacggtgacagaatgtgagagccgaatggtgcagagtatagacttccagactgagatgagtcgctccctggactggctgaggagagtgaaggcagagctcagtgggccggtgtacctagacctcaacctgcaggacatccaagaggaaatcagaaaaatccaaattcatcaggaagaggtccagtccagcttgagaatcatgaatgcgctgagtcacaaggaaaaggagaagttcacaaaggccaaggagctgatttctgcggatttagaacacagcctcgctgagctctcagagctggatggagacatccaggaagccttacgcaccagacaggctaccttgactgaaatatatagccagtgtcaaaggtattatcaggtatttcaagcagccaatgactggcttgaggatgcccaagaattgttacagctggcaggcaatggcctagacgtggagagcgcagaggaaaatctcaaaagccacatggaatttttcagtacagaggatcagttccatagtaacctggaggagctccacagcctggtagccaccctggacccactcatcaagccaaccggcaaagaagacctagaacagaaagtggcttctctggaactcaggagccagaggatgagccgggactctggtgcccaagtggatctcttgcagagatgcacagctcaatggcacgattaccagaaagcaagggaagaggttattgaattgatgaatgatacagaaaagaaattgtctgagttttctttgttgaagacttcgtctagtcatgaagcggaagaaaaattgtcagaacacaaggctttagtgtcagtggttaactctttccatgagaaaattgtggcccttgaggaaaaagcttcacaactggagaaaaccggaaatgatgccagcaaagccaccctgagcaggtcaatgaccaccgtctggcagcgctggacacgccttcgagctgtggcccaggaccaggagaagatcctggaagatgcagtggatgagtggacgggctttaacaacaaggttaaaaaggccactgaaatgattgatcagctgcaagataagttacctggaagttcagcagagaaagcatcgaaagcagagctcttaactcttcttgaataccacgacacgttcgttctggagctggagcagcagcagtcggccttgggcatgctgcggcagcaaaccctgagcatgctccaggatggagccgccccaacccctggggaagagcctccgctcatgcaggaaatcaccgccatgcaagatcggtgcctgaacatgcaggagaaagtgaagactaatggaaagttggtgaagcaagagctgaaggaccgagaaatggtggagactcagatcaattctgtgaaatgttgggttcaggaaacgaaagaatatttagggaatccaacaatagaaatagatgctcaacttgaagaacttcagattctcctaacagaagccacaaatcaccgacagaacattgaaaaaatggcagaagaacagaaggagaagtacttaggtctttataccatattaccttctgaactctcccttcagttggctgaagtggcgttagatctaaagatccgagatcagatccaagacaaaataaaagaagttgagcagagcaaggccacgagccaggaactcagccggcaaattcagaagttagctaaagacctcacaactattctaactaagctgaaagcgaagacagataatgtagttcaagctaaaactgaccaaaaggtgctgggagaggaattagatggctgtaattcaaagttaatggaattagatgcagcagtacagaaattcttggaacagaatggccaactgggtaagccactggccaagaagataggaaaactgactgaacttcaccagcagaccattagacaagctgagaatcggctctccaagctcaatcaggcagcatcacatttagaagaatacaatgaaatgcttgaattaattttgaagtggattgaaaaagctaaagtcttggctcatggaactattgcatggaattctgcaagccagcttcgggaacaatatattttgcatcagaccctgctagaagaatccaaagaaattgacagtgagctggaagcaatgactgagaaattacagtacctcactagcgtgtactgtacagaaaaaatgtctcagcaagtggcagaactgggacgggagactgaggagttgcgacagatgatcaaaattcgtttgcagaacctccaagatgcagctaaggatatgaaaaaatttgaagcagagttgaaaaagttacaagctgccttggagcaagcccaggcaacactgacttctccagaagttggacgtctcagtctcaaggagcagctctctcatcggcagcatttgttgtctgagatggagtcactgaagccgaaggtgcaagcagtgcagctctgccagagtgccctccggatccccgaggatgtggttgccagcttacctctctgtcatgctgctctgcggctgcaggaagaggccagccggctgcagcacaccgccatccagcagtgtaacatcatgcaggcagctgtggtacaatatgaacaatatgagcaagaaatgaaacatctccagcaactgatagaaggagctcacagagagattgaggataaacctgttgccaccagtaacatacaggagctgcaggctcagatttctcggcatgaggagctggcgcagaaaattaagggctaccaggagcagatcgcttctttgaattccaagtgcaagatgctgacgatgaaagccaagcacgccaccatgctgctgacggtgaccgaggtcgaggggctggcggaagggacagaggacctggatggggagctcctccccacgccttcggcccacccctctgtggtcatgatgactgcaggtcgctgtcacactttgctgtcaccggtcactgaggagtctggggaggagggaaccaacagtgagatttcctctccacctgcctgtcgctccccttcacctgtggctaatacagatgcttctgttaaccaggacattgcatattaccaagccttgtctgctgagaggttgcagacagatgctgcaaaaattcaccccagcacatccgcatcccaggagttctatgaaccgggattggagccatccgctactgccaaactgggtgatttgcagcgttcttgggaaaccttaaagaatgtgatcagtgagaagcagcgcacactctatgaagctttggaacgccagcagaagtaccaggactccctccagtccatctctacgaagatggaggccattgagctgaaactcagtgagagcccagagcctggcaggagtccagaaagccagatggctgaacatcaggcattgatggatgagattctcatgctccaggatgaaatcaatgagctccagtcctctctcgcagaggagctggtatccgagtcttgtgaggccgaccctgcggagcagctggccttgcagtccacgctcactgtcttagccgagcgaatgtccaccatcaggatgaaagcctcggggaaacggcagcttttggaggagaagttgaatgatcagctggaggaacaaaggcaggaacaggccctgcagaggtatcgctgtgaagccgatgagctggacagctggctcttgagtaccaaggccactctggacactgcgctgagtccacccaaggagcccatggacatggaggcccagcttatggactgccagaatatgctggtggaaatagagcagaaggtggtggctttatcagaactgtcagtccacaatgagaacctgctgctggagggcaaagctcacaccaaggacgaggccgagcagctggctggaaagctgagaaggctcaaggggagcctgctggagctgcagagagccctgcatgataagcagctcaacatgcagggaacagcacaggagaaggaggagagcgatgttgacctaacagccacgcagagccccggcgtccaggaatggctggcccaagctcgcaccacatggacccagcagcggcagagcagtctccagcaacaaaaagagttagaacaggaattagccgagcagaagagtctccttcgctcagtagccagtcgtggagaggagattctaattcaacattcggcggcagagacctctggtgatgctggcgaaaaacctgatgtgttatcccaggagttggggatggaaggggagaaatcatccgctgaagaccagatgagaatgaaatgggaaagcctacatcaagaatttagtaccaagcagaaactactacagaatgttctggaacaggaacaagagcaagtgctttatagcaggccaaatcgactcttgtctggtgtgccactgtacaaaggggacgtgccaacccaagataaatctgcagttacatctttgctggatggactgaaccaagccttcgaggaggtttcatcccagagtggaggggcaaagaggcagagtatacacttggagcagaagttgtatgatggagtctcagccacctctacttggttggatgacgttgaagaacgtttatttgttgccacagcacttttaccagaagaaacagagacttgtctcttcaaccaagagattcttgccaaagacattaaggaaatgtctgaagaaatggataagaacaaaaacttgttttcccaagcttttccagagaatggtgataatcgagatgttattgaagatactttgggttgtcttttgggcaggttatccttgctagactcagtagtgaatcaacgatgtcatcagatgaaagaaagacttcagcaaatactaaatttccagaatgatctgaaagtgctgtttacatcactggctgacaacaaatacatcattctgcaaaaactggcaaatgtgtttgaacagcccgtagcagaacaaatagaggcaatacaacaggctgaagatggactcaaagaatttgatgcaggaatcattgaattaaagaggcgtggtgacaagctacaggtcgagcagccgtccatgcaagaactctccaagctccaggacatgtatgatgagctgatgatgatcattggctcccggaggagtggtctgaatcagaaccttacactcaagagtcagtatgagagggccctacaagatctggctgacctgctagaaactggtcaggagaagatggcaggagaccagaaaatcatcgtgtcttccaaagaggaaatccagcaactacttgacaaacataaggaatactttcagggcctggaatctcatatgatcttgactgaaacactcttcagaaagataatcagctttgcagtccaaaaggaaacccagttccatacagagctgatggctcaggcttctgctgtactgaaacgggctcacaagaggggtgtggagctggagtacattctagagacgtggtcccatctggatgaggaccagcaggagctcagcagacagctggaggtggtggaaagcagcatcccaagcgtgggtctggtggaggagaacgaggacaggcttattgaccgcataacactctaccagcatttaaaatctagccttaatgaataccagcccaaattatatcaagtattagatgatgggaaacgacttctgatatccatcagctgctcagatctagaaagccaactaaatcaacttggagagtgctggctaagtaacaccaataaaatgtctaaggaacttcacagactggaaacaatattgaaacactggaccagatatcaaagtgaatctgcagatctaattcactggttacaatctgcaaaagaccggctagaattttggactcagcaatctgtgacagtcccacaagagctggaaatggtccgtgatcatctaaatgctttcctggagttttctaaagaagtggatgcccaatcttccctgaaatcatctgttctgagtactggaaatcagctccttcgactaaaaaaggtggacacagccacgctgcgctctgagctgtcgcgcattgatagccagtggactgacctgctaaccaatatcccagccgtccaggagaagctccaccagctccagatggataaactgccttcccgccatgccatttctgaagtcatgagttggatttctctaatggaaaatgttattcagaaggatgaagataatattaaaaattccataggttacaaggcaattcatgaataccttcagaaatataagggttttaagatagacattaactgtaaacagctgacagtggattttgtgaaccagtccgtgctacaaatcagcagtcaggatgtggaaagtaagcgtagtgataagactgattttgctgagcaacttggagcaatgaataaaagttggcaaattctgcaaggtctagtaactgagaagatccagctgttggaaggcttattggaatcttggtcagaatatgaaaataatgtacaatgtctgaaaacatggtttgaaacccaggaaaagagactaaaacaacagcatcgaattggagatcaggcttctgttcaaaatgcactgaaagactgtcaggatctggaagatttgattaaagcaaaagaaaaagaagtagagaaaattgagcagaatggacttgctttgattcagaacaagaaagaagacgtctctagcattgtcatgagcacactgcgagagctcggccaaacctgggcaaatttagatcacatggttggacaattaaagatactgctgaaatcagtgcttgaccaatggagtagtcacaaagtggcctttgacaagataaacagttacctcatggaggccagatactctctttcccgattccgtctgctgactggctccttagaagctgtgcaagttcaggtggacaatcttcagaatctccaagatgatctggaaaaacaggaaaggagcttacagaaatttggctctatcaccaaccaattattaaaagagtgtcacccacccgtgacagaaactcttaccaatacactgaaagaagtcaacatgagatggaataacttgctggaagagattgctgagcagctacagtccagcaaggccctacttcagctttggcaaagatacaaggactactccaaacagtgtgcttcgacagttcagcagcaggaggatcgaaccaatgagctgttgaaggcagccacaaacaaggacattgccgatgatgaggttgccacatggattcaagattgcaacgacctcctcaaaggactgggcacagttaaagattccctctttgttctccatgagctgggagagcaactgaagcaacaagtggatgcttccgcagcatcagctattcaatcggatcaactctctttgagtcaacacttgtgtgccctggagcaagctctctgcaaacagcagacttcattacaggctggagttcttgattatgaaacctttgccaagagtttagaagctttggaggcctggatagtggaagctgaagaaatactacaagggcaggaccctagccactcatctgacctctccacaatccaggaaaggatggaagaacttaagggacagatgttaaaattcagcagcatggctccagatttagaccgtctaaatgagcttggatataggttacccttgaatgataaggaaatcaaaagaatgcagaatctgaaccgccattggtctctgatctcctctcagactacagaaagattcagcaagttgcagtcatttttgctacaacatcagactttcttggaaaaatgtgaaacatggatggaattcctagttcagacagaacaaaagttagcagtagagatttcaggaaattatcagcaccttttggaacagcagagagcacacgagttgtttcaagccgagatgttcagtcgtcagcagattttgcactcaatcattattgatgggcaacgtcttctagaacaaggtcaagttgatgacagggatgaattcaacctgaaattgacactcctcagtaatcaatggcagggagtgattcgcagggcccagcagaggcgggggatcattgacagccagattcgccagtggcagcgctatagggagatggcagaaaagcttcgtaaatggttggttgaagtgtcctacctccccatgagtggtctcggaagtgttcctataccactgcaacaagcaaggaccctctttgatgaagtgcagttcaaagaaaaagtgtttctgcggcaacaaggcagctacatcctgactgtggaggctggcaagcaactccttctctcggcggacagtggcgctgaggccgccttgcaggccgaactcgctgaaatccaagagaaatggaaatcagccagcatgcggctggaagaacagaagaaaaaactagccttcttgttgaaagactgggaaaaatgtgagaaaggaatagcagattccctggagaaactacgaactttcaaaaagaagctttcgcagtctctcccggatcaccatgaagagctccatgcagaacaaatgcgttgcaaggaattagaaaatgcagttgggagctggacagatgacttgacccagttgagcctgctgaaggacaccctctctgcctatatcagtgctgatgatatctccattcttaatgaacgcgtagagcttctgcaaaggcagtgggaagaactatgccaccagctctccttaaggcggcagcaaataggtgaaagattgaatgaatgggcagtcttcagtgaaaagaacaaggaactctgtgagtggttgactcaaatggaaagcaaagtttctcagaatggagacattctcattgaagaaatgatagagaagctcaagaaggattatcaagaggaaattgctattgctcaagagaacaaaatacagctccaacaaatgggagaacgacttgctaaagccagccatgaaagcaaagcatctgagattgaatacaagctgggaaaggtcaacgaccggtggcagcatctcctggacctcattgcagccagggtgaagaagctgaaggagaccctggtagccgtgcagcagcttgataagaacatgagcagcctgaggacctggctcgctcacatcgagtcagagctggccaagccaatagtctacgattcctgtaactcggaagaaatacagagaaagcttaatgagcagcaggagcttcagagagacatagagaagcacagtacaggtgttgcatctgtcctcaacctgtgtgaagtcctgctgcacgactgtgacgcctgtgccactgatgccgagtgtgactctatacagcaggctacgagaaacctggaccggcggtggagaaacatttgtgctatgtccatggaaaggaggctgaaaatcgaagagacgtggcgattgtggcagaaatttctggatgactattcacgttttgaagattggctgaagtcttcagaaaggacagctgcttttcccagctcttctggggtgatctatacagttgccaaggaagaactaaagaaatttgaggctttccagcgacaggtccacgagtgcctgacgcagctggaactgatcaacaagcagtaccgccgcctggccagggagaaccgcactgattcagcatgtagcctcaaacagatggttcacgaaggcaaccagagatgggacaacctgcaaaagcgtgtcacctccatcttgcgcagactcaagcattttattggccagcgtgaggagtttgagactgcgcgggacagcattctggtctggctcacagagatggatctgcagctcactaatattgaacatttttctgagtgtgatgttcaagctaaaataaagcaactcaaggccttccagcaggaaatttcactgaaccacaataagattgagcagataattgcccaaggagaacagctgatagaaaagagtgagcccttggatgcagcgatcatcgaggaggaactagatgagctccgacggtactgccaggaggtcttcgggcgtgtggaaagataccataagaaactgatccgcctgcctctcccagacgatgagcacgacctctcagacagggagctggagctggaagactctgcagctctgtcggacctgcactggcacgaccgctctgcagacagcctgctttctccacagccttcctccaatctctccctctcgctcgctcagcccctccggagcgagcggtcaggacgagacaccccggctagtgtggactccatccccctggagtgggatcacgactatgacctcagtcgggacctggagtctgcaatgtccagagctctgccctctgaggatgaagaaggtcaggatgacaaagatttctacctccggggagctgttggcttatcagatgtaatgatccccgaaagccctgaggcctatgtaaaactcacagaaaatgcaatcaaaaatacctccggggaccacagtgccctagagtcacagatccgacaactgggcaaagccctggatgatagccgctttcagatacagcaaaccgaaaatatcattcgcagcaaaactcccacggggccggagctagacaccagctacaaaggctacatgaaactgctgggcgaatgcagtagcagtatagactccgtgaagagactggagcacaaactgaaggaggaagaggagagccttcctggctttgttaacctgcatagtaccgaaacccaaacggctggtgtgattgaccgatgggagcttctccaggcccaggcattgagcaaggagttgaggatgaagcagaacctccagaagtggcagcagtttaactcagacttgaacagcatctgggcctggctgggggacacggaggaggagttggaacagctccagcgtctggaactcagcactgacatccagaccatcgagctccagatcaaaaagctcaaggagctccagaaagctgtggaccaccgcaaagccatcatcctctccatcaatctctgcagccctgagttcacccaggctgacagcaaggagagccgggacctgcaggatcgcttgtcgcagatgaatgggcgctgggaccgagtgtgctctctgctggaggagtggcggggcctgctgcaggatgccctgatgcagtgccagggtttccatgaaatgagccatggtttgcttcttatgctggagaacattgacagaaggaaaaatgaaattgtccctattgattctaaccttgatgcagagatacttcaggaccatcacaaacagcttatgcaaataaagcatgagctgttggaatcccaactcagagtagcctctttgcaagacatgtcttgccaactactggtgaatgctgaaggaacagactgtttagaagccaaagaaaaagtccatgttattggaaatcggctcaaacttctcttgaaggaggtcagtcgtcatatcaaggaactggagaagttattagacgtgtcaagtagtcagcaggatttgtcttcctggtcttctgctgatgaactggacacctcagggtctgtgagtcccacatcaggaaggagcaccccaaacagacagaaaacgccacgaggcaagtgtagtctctcacagcctggaccctctgtcagcagtccacatagcaggtccacaaaaggtggctccgattcctccctttctgagccagggccaggtcggtccggccgcggcttcctgttcagagtcctccgagcagctcttccccttcagcttctcctgctcctcctcatcgggcttgcctgccttgtaccaatgtcagaggaagactacagctgtgccctctccaacaactttgcccggtcattccaccccatgctcagatacacgaatggccctcctccactctgaactaagcagatgccatctgcagaagtgctggtagcataaggaggatcgggtcataagcaatcccaaactaccaacaagaggaccttgatcttggcgaaagccctcggtgtggcagctttagccctcctccagatcacatgtgtgcaaattatggcttcagaggtggaagataaacagtgacgggggaacaaacagacaacaagaaggtttggaagaaatctggtttgagactctgaaccttagcactaaggagattgagtaaggacctccaaagttccccggactcatgaattctgggcccttggcccattctgtgcacagccaaggacttcagtagaccatctgggcagctttcccatggtgctgctccaaccatcagataaatgaccctcccaagcaccatgtcagtgtcgtacaatctaccaaccaaccagtgctgaagagattttagaaccttgtaacatacaatttttaagagcttatatggcagcttcctttttaccttgttttcctttggggcatgatgttttaacctttgctttagaagcacaagctgtaaatctaaaaggcacttttttttagaggtataaagaaaaactagatgtaataaataagatcatggaaggctttatgtgaaaaaagttgaatgttatagtaaaaaaaaaaagatatttatgtatgtacagtttgctaaagccaagttttgtttgtattgatttctttgcatttattatagatattataaaat

SEQ ID NO: 2500 - protein, 8705 aa, Homo sapiens
MATSRGASRCPRDIANVMQRLQDEQEIVQKRTFTKWINSHLAKRKPPMVVDDLFEDMKDGVKLLALLEVLSGQKLPCEQGRRMKRIHAVANIGTALKFLEGRKSMHRGSPIKLVNINSTDIADGRPSIVLGLMWTIILYFQIEELTSNLPQLQSLSSSASSVDSIVSSETPSPPSKRKVTTKIQGNAKKALLKWVQYTAGKQTGIEVKDFGKSWRSGVAFHSVIHAIRPELVDLETVKGRSNRENLEDAFTIAETELGIPRLLDPEDVDVDKPDEKSIMTYVAQFLKHYPDIHNASTDGQEDDEILPGFPSFANSVQNFKREDRVIFKEMKVWIEQFERDLTRAQMVESNLQDKYQSFKHFRVQYEMKRKQIEHLIQPLHRDGKLSLDQALVKQSWDRVTSRLFDWHIQLDKSLPAPLGTIGAWLYRAEVREEITVQQVHEETANTIQRKLEQHKDLLQNTDAHKRAFHEIYRTRSVNGIPVPPDQLEDMAERFHFVSSTSELHLMKMEFLELKYRLLSLLVLAESKLKSWIIKYGRRESVEQLLQNYVSFIENSKFFEQYEVTYQILKQTAEMYVKADGSVEEAENVMKFMNETTAQWRNLSVEVRSVRSMLEEVISNWDRYGNTVASLQAWLEDAEKMLNQSENAKKDFFRNLPHWIQQHTAMNDAGNFLIETCDEMVSRDLKQQLLLLNGRWRELFMEVKQYAQADEMDRMKKEYTDCVVTLSAFATEAHKKLSEPLEVSFMNVKLLIQDLEDIEQRVPVMDAQYKIITKTAHLITKESPQEEGKEMFATMSKLKEQLTKVKECPLLYESQQLLIPLEELEKQMTSFYDSLGKINEIITVLEREAQSSALFKQKHQELLACQENCKKTLTLIEKGSQSVQKFVTLSNVLKHFDQTRLQRQIADIHVAFQSMVKKTGDWKKHVETNSRLMKKFEESRAELEKVLRIAQEGLEEKGDPEELLRRHTEFFSQLDQRVLNAFLKACDELTDILPEQEQQGLQEAVRKLHKQWKDLQGEAPYHLLHLKIDVEKNRFLASVEECRTELDRETKLMPQEGSEKIIKEHRVFFSDKGPHHLCEKRLQLIEELCVKLPVRDPVRDTPGTCHVTLKELRAAIDSYKLMEDPDKWKDYTSRFSEFSSWISTNETQLKGIKGEAIDTANHGEVKRAVEEIRNGVTKRGETLSWLKSRLKVLTEVSSENEAQKQGDELAKLSSSFKALVTLLSEVEKMLSNFGDCVQYKEIVKNSLEELISGSKEVQEQAEKILDTENLFEAQQLLLHHQQKTKRISAKKRDVQQQIAQAQQGEGGLPDRGHEELRKLESTLDGLERSRERQERRIQVTLRKWERFETNKETVVRYLFQTGSSHERFLSFSSLESLSSELEQTKEFSKRTESIAVQAENLVKEASEIPLGPQNKQLLQQQAKSIKEQVKKLEDTLEEDIKTMEMVKTKWDHFGSNFETLSVWITEKEKELNALETSSSAMDMQISQIKVTIQEIESKLSSIVGLEEEAQSFAQFVTTGESARIKAKLTQIRRYGEELREHAQCLEGTILGHLSQQQKFEENLRKIQQSVSEFEDKLAVPIKICSSATETYKVLQEHMDLCQALESLSSAITAFSASARKVVNRDSCVQEAAALQQQYEDILRRAKERQTALENLLAHWQRLEKELSSFLTWLERGEAKASSPEMDISADRVKVEGELQLIQALQNEVVSQASFYSKLLQLKESLFSVASKDDVKMMKLHLEQLDERWRDLPQIINKRINFLQSVVAEHQQFDELLLSFSVWIKLFLSELQTTSEISIMDHQVTRHKDHAAEVESKKGELQSLQGHLAKLGSLGRAEDLHLLQGKAEDCFQLFEEASQVVERRQLALSHLAEFLQSHASLSGILRQLRQTVEATNSMNKNESDLIEKDLNDALQNAKALESAAVSLDGILSKAQYHLKIGSSEQRTSCRATADQLCGEVERIQNLLGTKQSEADAVLKKAFQDQKEELLKSIEDIEERTDKERLKEPTRQALQQRLRVFNQLEDELNSHEHELCWLKDKAKQIAQKDVAFAPEVDREINRLEVTWDDTKRLIHENQGQCCGLIDLMREYQNLKSAVSKVLENASSVIVTRTTIKDQEDLKWAFSKHETAKNKMNYKQKDLDNFTSKGKHLLSELKKIHSSDFSLVKTDMESTVDKWLDVSEKLEENMDRLRVSLSIWDDVLSTRDEIEGWSNNCVPQMAENISNLDNHLRAEELLKEFESEVKNKALRLEELHSKVNDLKELTKNLETPPDLQFIEADLMQKLEHAKEITEVAKGTLKDFTAQSTQVEKFINDITTWFTKVEESLMNCAQNETCEALKKVKDIQKELQSQQSNISSTQENLNSLCRKYHSAELESLGRAMTGLIKKHEAVSQLCSKTQASLQESLEKHFSESMQEFQEWFLGAKAAAKESSDRTGDSKVLEAKLHDLQNILDSVSDGQSKLDAVTQEGQTLYAHLSKQIVSSIQEQITKANEEFQAFLKQCLKDKQALQDCASELGSFEDQHRKLNLWIHEMEERFNTENLGESKQHIPEKKNEVHKVEMFLGELLAARESLDKLSQRGQLLSEEGHGAGQEGRLCSQLLTSHQNLLRMTKEKLRSCQVQEHEALEEALQSMWFWVKAIQDRLACAESTLGSKDTLEKRLSQIQDILLMKGEGEVKLNMAIGKGEQALRSSNKEGQRVIQTQLETLKEVWADIMSSSVHAQSTLESVISQWNDYVERKNQLEQWMESVDQKIEHPLQPQPGLKEKFVLLDHLQSILSEAEDHTRALHRLIAKSRELYEKTEDESFKDTAQEELKTQFNDIMTVAKEKMRKVEEIVKDHLMYLDAVHEFTDWLHSAKEELHRWSDMSGDSSATQKKLSKIKELIDSREIGASRLSRVESLAPEVKQNTTASGCELMHTEMQALRADWKQWEDSVFQTQSCLENLVSQMALSEQEFSGQVAQLEQALEQFSALLKTWAQQLTLLEGKNTDEEIVECWHKGQEILDALQKAEPRTEDLKSQLNELCRFSRDLSTYSGKVSGLIKEYNCLCLQASKGCQNKEQILQQRFRKAFRDFQQWLVNAKITTAKCFDIPQNISEVSTSLQKIQEFLSESENGQHKLNMMLSKGELLSTLLTKEKAKGIQAKVTAAKEDWKNFHSNLHQKESALENLKIQMKDFEVSAEPIQDWLSKTEKMVHESSNRLYDLPAKRREQQKLQSVLEEIHCYEPQLNRLKEKAQQLWEGQAASKSFRHRVSQLSSQYLALSNLTKEKVSRLDRIVAEHNQFSLGIKELQDWMTDAIHMLDSYCHPTSDKSVLDSRTLKLEALLSVKQEKEIQMKMIVTRGESVLQNTSPEGIPTIQQQLQSVKDMWASLLSAGIRCKSQLEGALSKWTSYQDGVRQFSGWMDSMEANLNESQHAELRDKTTMLGKAKLLNEEVLSYSSLLETIEVKGAGMTEHYVTQLELQDLQERYRAIQERAKEAVTKSEKLVRLHQEYQRDLKAFEVWLGQEQEKLDQYSVLEGDAHTHETTLRDLQELQVHCAEGQALLNSVLHTREDVIPSGIPQAEDRALESLRQDWQAYQHRLSETRTQFNNVVNKLRLMEQKFQQVDEWLKTAEEKKWHEEVTAYRDEVEEVGARAQEILDESHVNSRMGCQATQLTSRYQALLLQVLEQIKFLEEEIQSLEESESSLSSYSDWYGSTHKNFKNVATKIDKVDTVMMGKKLKTLEVLLKDMEKGHSLLKSAREKGERAVKYLEEGEAERLRKEIHDHMEQLKELTSTVRKEHMTLEKGLHLAKEFSDKCKALTQWIAEYQEILHVPEEPKMELYEKKAQLSKYKSLQQTVLSHEPSVKSVREKGEALLELVQDVTLKDKIDQLQSDYQDLCSIGKAMMEEIAGFEDRLNNLQMKGDTLIGQCADHLQAKLKQNVHAHLQGTKDSYSAICSTAQRMYQSLEHELQKHVSRQDTLQQCQAWLSAVQPDLEPSPQPPLSRAEAIKQVKHFRALQEQARTYLDLLCSMCDLSNASVKTTAKDIQQTEQTIEQRLVQAQNLTQGWEEIKHLKSELWIYLQDADQQLQNMKRRHSELELNIAQNMVSQVKDFVKKLQSKQASVNTIIEKVNKLTKKEESPEHKEINHLNDQWLDLCRQSNNLCLQREEDLQRTRDYHDCMNVVEVFLEKFTTEWDNLARSDAESTAVHLEALKKLALQERKYAIEDLKDQKQKMIEHLNLDDKELVKEQTSHLEQRWFQLEDLIKRKIQVSVTNLEELNVVQSRFQELMEWAEEQQPNIAEALKQSPPPDMAQNLLMDHLAICSELEAKQMLLKSLIKDADRVMADLQERQVIQKALSDAQSHVNCLSDLVGQRRKYLNKALSEKTQFLMAVFQATSQIQQHERKIMFREHICLLPDDVSKQVKTCKSAQASLKTYQNEVTGLWAQGRELMKEVTEQEKSEVLGKLQELQSVYDSVLQKCSHRLQELEKNLVSRKHFKEDFDKACHWLKQADIVTFPEINLMNESTELHTQLAKYQNIQSPEYENLLLTLQRTGQTILPSLNEVDHSYLSEKLNALPRQFNVIVAKDKFYKVQEAILARKEYASLIELTTQSLSELEAQFLRMSKVPTDLAVEEALSLQDGCRAILDEVAGLGEAVDELNQKKEGFRSTGQPWQPDKMLHLVTLYHRLKRQTEQRVSLLEDTTSAYQEHEKMCQQLERQLKSVKEEQSKVNEETLPAEEKLKMYHSLAGSLQDSGIVLKRVTIHLEDLAPHLDPLAYEKARHQIQSWQGELKLLTSAIGETVTECESRMVQSIDFQTEMSRSLDWLRRVKAELSGPVYLDLNLQDIQEEIRKIQIHQEEVQSSLRIMNALSHKEKEKFTKAKELISADLEHSLAELSELDGDIQEALRTRQATLTEIYSQCQRYYQVFQAANDWLEDAQELLQLAGNGLDVESAEENLKSHMEFFSTEDQFHSNLEELHSLVATLDPLIKPTGKEDLEQKVASLELRSQRMSRDSGAQVDLLQRCTAQWHDYQKAREEVIELMNDTEKKLSEFSLLKTSSSHEAEEKLSEHKALVSVVNSFHEKIVEEKASQLEKTGNDASKATLSRSMTTVWQRWTRLRAVAQDQEKIDAVDEWTGFNNKVKKATEMIDQLQDKLPGSSAEKASKAELLTLLEYHDTFVLELEQQQSALGMLRQQTLSMLQDGAAPTPGEEPPLMQEITAMQDRCLNMQEKVKTNGKLVKQELKDREMVETQINSVKCWVQETKEYLGNPTIEIDAQLEELQILLTEATNHRQNIEKMAEEQKEKYLGTILPSELSLQLAEVDLKIRDQIQDKIKEVEQSKATSQELSRQIQKLAKDLTTILTKLKAKTDNVVQAKTDQKVLGEELDGCNSKLMELDAAVQKFLEQNGQLGKPLAKKIGKLTELHQQTIRQAENRLSKLNQAASHLEEYNEMLELILKWIEKAKVLAHGTIAWNSASQLREQYILHQTLLEESKEIDSELEAMTEKLQYLTSVYCTEKMSQQVAELGRETEELRQMIKIRLQNLQDAAKDMKKFEAELKKLQAALEQAQATLTSPEVGRLSLKEQLSHRQHLLSEMESLKPKVQAVQLCQSALRIPEDVVASLPLCHAALRLQEEASRLQHTAIQQCNIMQAAVVQYEQYEQEMKHLQQLIEGAHREIEDKPVATSNIQELQAQISRHEELAQKIKGYQEQIASLNSKCKMLTMKAKHATMLLTVTEVEGLAEGTEDLDGELLPTPSAHPSVVMMTAGRCHTLLSPVTEESGEEGTNSEISSPPACRSPSPVANTDASVNQDIAYYQALSAERLQTDAAKIHPSTSASQEFYEPGLEPSATAKLGDLQRSWETLKNVISEKQRTLYEALERQQKYQDSLQSISTKMEAIELKLSESPEPGRSPESQMAEHQALMDEILMLQDEINELQSSLAEELVSESCEADPAEQLALQSTLTVLAERMSTIRMKASGKRQLLEEKLNDQLEEQRQEQALQRYRCEADELDSWLLSTKATLDTALSPPKEPMDMEAQLMDCQNMLVEIEQKVVSELSVHNENLLLEGKAHTKDEAEQLAGKLRRLKGSLLELQRALHDKQLNMQGTAQEKEESDVDLTATQSPGVQEWLAQARTTWTQQRQSSLQQQKELEQELAEQKSLLRSVASRGEEILIQHSAAETSGDAGEKPDVLSQELGMEGEKSSAEDQMRMKWESLHQEFSTKQKLLQNVLEQEQEQVKRPNRLLSGVPLYKGDVPTQDKSAVTSLLDQQAFEEVSSQSGGAKRQSIHLEQKLYDGVSATSTWLDDVEERLFVATALLPEETETCLFNQEILAKDIKEMSEEMDKNKNLFSQAFPENGDNRDVIEDTLGCLLGRLSLLDSVVNQRCHQMKERLQQILNFQNDLKVLFTSLADNKYIILQKLANVFEQPVAEQIEAIQQAEDGLKEFDAGIIELKRRGDKLQVEQPSMQELSKLQDMYDELMMIIGSRRSQQNLTLKSQYERALQDLADLLETGQEKMAGDQKIIVSSKEEIQQLLDKHKEYFQGLESHMILTETLFRKIISFAVQKETQFHTELMAQASAVLKRAHKRGVELEYITWSHLDEDQQELSRQLEVVESSIPSVGLVEENEDRLIDRITLYQHLKSSLNEYQPKLYQVLDDGKRLLISISCSDLESQLNQLGECWLSNTNKMSKELHRLETILKHWTRYQSESADLIHWLQSAKDRLEFWTQQSVTVPQELEMVRDHLNAFLEFSKEVDAQSSLKSSVLSTGNQLLRLKKVDTATLRSELSRIDSQWTDLLTNIPAVQEKLHQLQMDKLPSRHAISEVMSWISLMENVIQKDEDNIKNSIGYKAIHEYLQKYKGFKIDINCKQLTVDFVNQSVLQISSQDVESKRSDKTDFAEQLGAMNKSWQILQGLVTEKIQLLEGLLESWSEYENNVQCLKTWFETQEKRLKQQHRIGDQASVQNALKDCQDLEDLIKAKEKEVEKIEQNGLALIQNKKEDVSSIVMSTLRELGQTWANLDHMVGQLKILLKSVLDQWSSHKVAFDKINSYLMEARYSLSRFRLLTGSLEAVQVQVDNLQNLQDDLEKQERSLQKFGSITNQLLKECHPPVTETLTNTLKEVNMRWNNLLEEIAEQLQSSKALLQLWQRYKDYSKQCASTVQQQEDRTNELLKAATNKDIADDEVATWIQDCNDLLKGLGTVKDSLFVLHELGEQLKQQVDASAASAIQSDQLSLSQHLCALEQALCKQQTSLQAGVLDYETFAKSLEALEAWIVEAEEILQGQDPSHSSDLSTIQERMEELKGQMLKFSSMAPDLDRLNELGYRLPLNDKEIKRMQNLNRHWSLISSQTTERFSKLQSFLLQHQTFLEKCETWMEFLVQTEQKLAVEISGNYQHLLEQQRAHELFQAEMFSRQQILHSIIIDGQRLLEQGQVDDRDEFNLKLTLLSNQWQGVIRRAQQRRGIIDSQIRQWQRYREMAEKLRKWLVEVSYLPMSGLGSVPIPLQQARTLFDEVQFKEKVFLRQQGSYILTVEAGKQLLLSADSGAEAALQAELAEIQEKWKSASMRLEEQKKKLAFLLKDWEKCEKGIADSLEKLRTFKKKLSQSLPDHHEELHAEQMRCKELENAVGSWTDDLTQLSLLKDTLSAYISADDISILNERVELLQRQWEELCHQLSLRRQQIGERLNEWAVFSEKNKELCEWLTQMESKVSQNGDILIEEMIEKLKKDYQEEIAIAQENKIQLQQMGERLAKASHESKASEIEYKLGKVNDRWQHLLDLIAARVKKLKETLVAVQQLDKNMSSLRTWLAHIESELAKPIVYDSCNSEEIQRKLNEQQELQRDIEKHSTGVASVLNLCEVLLHDCDACATDAECDSIQQATRNLDRRWRNICAMSMERRLKIEETWRLWQKFLDDYSRFEDWLKSSTAAFPSSSGVIYTVAKEELKKFEAFQRQVHECLTQLELINKQYRRLARENRTDSACSLKQMVHEGNQRWDNLQKRVTSILRRLKHFIGQREEFETARDSILVWLTEMDLQLTNIEHFSECDVQAKIKQLKAFQQEISLNHNKIEQIIAQGEQLIEKSEPLDAAIIEEELDELRRYCQEVFGRVERYHKKLIRLPLPDDEHDLSDRELELEDSAALSDLHWHDRSADSLLSPQPSSNLSLSLAQPLRSSGRDTPASVDSIPLEWDHDYDLSRDLESAMSRALPSEDEEGQDDKDFYLRGAVGLSDVMIPESPEAYVKLTENAIKNTSGDHSALESQIRQLGKALDDSRFQIQQTENIIRSKTPTGPELDTSYKGYMKLLGECSSSIDSVKRLEHKLKEEEESLPGFVNLHSTETQTAGVIDRWELLQAQALSKELRMKQNLQKWQQFNSDLNSIWAWLGDTEEELEQLQRLELSTDIQTIELQIKKLKELQKAVDHRKAIILSINLCSPEFTQADSKESRDLQDRLSQMNGRWDRVCSLLEEWRGLLQDALMQCQGFHEMSHGLLLMLENIDRRKNEIVPIDSNLDAEILQDHHKQLMQIKHELLESQLRVASLQDMSCQLLVNAEGTDCLEAKEKVHVIGNRLKLLLKEVSRHIKELEKLLDVSSSQQDLSSWSSADELDTSGSVSPTSGRSTPNRQKTPRGKCSLSQPGPSVSSPHSRSTKGGSDSSLSEPGPGRSGRGFLFRVLRAALPLQLLLLLLIGLACLVPMSEEDYSCALSNNFARSFHPMLRYTNGPPPL

SEQ ID NO: 2501 - DNA, 10834 bp, Homo sapiens
caaaaatcagtctgatctcgggaaacctggagaaatttattttctgtactctaatgttctttcattttggtgaccatcaaggtgctgggagaggaattagatggctgtaattcaaagttaatggaattagatgcagcagtacagaaattcttggaacagaatggccaactgggtaagccactggccaagaagataggaaaactgactgaacttcaccagcagaccattagacaagctgagaatcggctctccaagctcaatcaggcagcatcacatttagaagaatacaatgaaatgcttgaattaattttgaagtggattgaaaaagctaaagtcttggctcatggaactattgcatggaattctgcaagccagcttcgggaacaatatattttgcatcagaccctgctagaagaatccaaagaaattgacagtgagctggaagcaatgactgagaaattacagtacctcactagcgtgtactgtacagaaaaaatgtctcagcaagtggcagaactgggacgggagactgaggagttgcgacagatgatcaaaattcgtttgcagaacctccaagatgcagctaaggatatgaaaaaatttgaagcagagttgaaaaagttacaagctgccttggagcaagcccaggcaacactgacttctccagaagttggacgtctcagtctcaaggagcagctctctcatcggcagcatttgttgtctgagatggagtcactgaagccgaaggtgcaagcagtgcagctctgccagagtgccctccggatccccgaggatgtggttgccagcttacctctctgtcatgctgctctgcggctgcaggaagaggccagccggctgcagcacaccgccatccagcagtgtaacatcatgcaggcagctgtggtacaatatgaacaatatgagcaagaaatgaaacatctccagcaactgatagaaggagctcacagagagattgaggataaacctgttgccaccagtaacatacaggagctgcaggctcagatttctcggcatgaggagctggcgcagaaaattaagggctaccaggagcagatcgcttctttgaattccaagtgcaagatgctgacgatgaaagccaagcacgccaccatgctgctgacggtgaccgaggtcgaggggctggcggaagggacagaggacctggatggggagctcctccccacgccttcggcccacccctctgtggtcatgatgactgcaggtcgctgtcacactttgctgtcaccggtcactgaggagtctggggaggagggaaccaacagtgagatttcctctccacctgcctgtcgctccccttcacctgtggctaatacagatgcttctgttaaccaggacattgcatattaccaagccttgtctgctgagaggttgcagacagatgctgcaaaaattcaccccagcacatccgcatcccaggagttctatgaaccgggattggagccatccgctactgccaaactgggtgatttgcagcgttcttgggaaaccttaaagaatgtgatcagtgagaagcagcgcacactctatgaagctttggaacgccagcagaagtaccaggactccctccagtccatctctacgaagatggaggccattgagctgaaactcagtgagagcccagagcctggcaggagtccagaaagccagatggctgaacatcaggcattgatggatgagattctcatgctccaggatgaaatcaatgagctccagtcctctctcgcagaggagctggtatccgagtcttgtgaggccgaccctgcggagcagctggccttgcagtccacgctcactgtcttagccgagcgaatgtccaccatcaggatgaaagcctcggggaaacggcagcttttggaggagaagttgaatgatcagctggaggaacaaaggcaggaacaggccctgcagaggtatcgctgtgaagccgatgagctggacagctggctcttgagtaccaaggccactctggacactgcgctgagtccacccaaggagcccatggacatggaggcccagcttatggactgccagaatatgctggtggaaatagagcagaaggtggtggctttatcagaactgtcagtccacaatgagaacctgctgctggagggcaaagctcacaccaaggacgaggccgagcagctggctggaaagctgagaaggctcaaggggagcctgctggagctgcagagagccctgcatgataagcagctcaacatgcagggaacagcacaggagaaggaggagagcgatgttgacctaacagccacgcagagccccggcgtccaggaatggctggcccaagctcgcaccacatggacccagcagcggcagagcagtctccagcaacaaaaagagttagaacaggaattagccgagcagaagagtctccttcgctcagtagccagtcgtggagaggagattctaattcaacattcggcggcagagacctctggtgatgctggcgaaaaacctgatgtgttatcccaggagttggggatggaaggggagaaatcatccgctgaagaccagatgagaatgaaatgggaaagcctacatcaagaatttagtaccaagcagaaactactacagaatgttctggaacaggaacaagagcaagtgctttatagcaggccaaatcgactcttgtctggtgtgccactgtacaaaggggacgtgccaacccaagataaatctgcagttacatctttgctggatggactgaaccaagccttcgaggaggtttcatcccagagtggaggggcaaagaggcagagtatacacttggagcagaagttgtatgatggagtctcagccacctctacttggttggatgacgttgaagaacgtttatttgttgccacagcacttttaccagaagaaacagagacttgtctcttcaaccaagagattcttgccaaagacattaaggaaatgtctgaagaaatggataagaacaaaaacttgttttcccaagcttttccagagaatggtgataatcgagatgttattgaagatactttgggttgtcttttgggcaggttatccttgctagactcagtagtgaatcaacgatgtcatcagatgaaagaaagacttcagcaaatactaaatttccagaatgatctgaaagtgctgtttacatcactggctgacaacaaatacatcattctgcaaaaactggcaaatgtgtttgaacagcccgtagcagaacaaatagaggcaatacaacaggctgaagatggactcaaagaatttgatgcaggaatcattgaattaaagaggcgtggtgacaagctacaggtcgagcagccgtccatgcaagaactctccaagctccaggacatgtatgatgagctgatgatgatcattggctcccggaggagtggtctgaatcagaaccttacactcaagagtcagtatgagagggccctacaagatctggctgacctgctagaaactggtcaggagaagatggcaggagaccagaaaatcatcgtgtcttccaaagaggaaatccagcaactacttgacaaacataaggaatactttcagggcctggaatctcatatgatcttgactgaaacactcttcagaaagataatcagctttgcagtccaaaaggaaacccagttccatacagagctgatggctcaggcttctgctgtactgaaacgggctcacaagaggggtgtggagctggagtacattctagagacgtggtcccatctggatgaggaccagcaggagctcagcagacagctggaggtggtggaaagcagcatcccaagcgtgggtctggtggaggagaacgaggacaggcttattgaccgcataacactctaccagcatttaaaatctagccttaatgaataccagcccaaattatatcaagtattagatgatgggaaacgacttctgatatccatcagctgctcagatctagaaagccaactaaatcaacttggagagtgctggctaagtaacaccaataaaatgtctaaggaacttcacagactggaaacaatattgaaacactggaccagatatcaaagtgaatctgcagatctaattcactggttacaatctgcaaaagaccggctagaattttggactcagcaatctgtgacagtcccacaagagctggaaatggtccgtgatcatctaaatgctttcctggagttttctaaagaagtggatgcccaatcttccctgaaatcatctgttctgagtactggaaatcagctccttcgactaaaaaaggtggacacagccacgctgcgctctgagctgtcgcgcattgatagccagtggactgacctgctaaccaatatcccagccgtccaggagaagctccaccagctccagatggataaactgccttcccgccatgccatttctgaagtcatgagttggatttctctaatggaaaatgttattcagaaggatgaagataatattaaaaattccataggttacaaggcaattcatgaataccttcagaaatataagggttttaagatagacattaactgtaaacagctgacagtggattttgtgaaccagtccgtgctacaaatcagcagtcaggatgtggaaagtaagcgtagtgataagactgattttgctgagcaacttggagcaatgaataaaagttggcaaattctgcaaggtctagtaactgagaagatccagctgttggaaggcttattggaatcttggtcagaatatgaaaataatgtacaatgtctgaaaacatggtttgaaacccaggaaaagagactaaaacaacagcatcgaattggagatcaggcttctgttcaaaatgcactgaaagactgtcaggatctggaagatttgattaaagcaaaagaaaaagaagtagagaaaattgagcagaatggacttgctttgattcagaacaagaaagaagacgtctctagcattgtcatgagcacactgcgagagctcggccaaacctgggcaaatttagatcacatggttggacaattaaagatactgctgaaatcagtgcttgaccaatggagtagtcacaaagtggcctttgacaagataaacagttacctcatggaggccagatactctctttcccgattccgtctgctgactggctccttagaagctgtgcaagttcaggtggacaatcttcagaatctccaagatgatctggaaaaacaggaaaggagcttacagaaatttggctctatcaccaaccaattattaaaagagtgtcacccacccgtgacagaaactcttaccaatacactgaaagaagtcaacatgagatggaataacttgctggaagagattgctgagcagctacagtccagcaaggccctacttcagctttggcaaagatacaaggactactccaaacagtgtgcttcgacagttcagcagcaggaggatcgaaccaatgagctgttgaaggcagccacaaacaaggacattgccgatgatgaggttgccacatggattcaagattgcaacgacctcctcaaaggactgggcacagttaaagattccctctttgttctccatgagctgggagagcaactgaagcaacaagtggatgcttccgcagcatcagctattcaatcggatcaactctctttgagtcaacacttgtgtgccctggagcaagctctctgcaaacagcagacttcattacaggctggagttcttgattatgaaacctttgccaagagtttagaagctttggaggcctggatagtggaagctgaagaaatactacaagggcaggaccctagccactcatctgacctctccacaatccaggaaaggatggaagaacttaagggacagatgttaaaattcagcagcatggctccagatttagaccgtctaaatgagcttggatataggttacccttgaatgataaggaaatcaaaagaatgcagaatctgaaccgccattggtctctgatctcctctcagactacagaaagattcagcaagttgcagtcatttttgctacaacatcagactttcttggaaaaatgtgaaacatggatggaattcctagttcagacagaacaaaagttagcagtagagatttcaggaaattatcagcaccttttggaacagcagagagcacacgagttgtttcaagccgagatgttcagtcgtcagcagattttgcactcaatcattattgatgggcaacgtcttctagaacaaggtcaagttgatgacagggatgaattcaacctgaaattgacactcctcagtaatcaatggcagggagtgattcgcagggcccagcagaggcgggggatcattgacagccagattcgccagtggcagcgctatagggagatggcagaaaagcttcgtaaatggttggttgaagtgtcctacctccccatgagtggtctcggaagtgttcctataccactgcaacaagcaaggaccctctttgatgaagtgcagttcaaagaaaaagtgtttctgcggcaacaaggcagctacatcctgactgtggaggctggcaagcaactccttctctcggcggacagtggcgctgaggccgccttgcaggccgaactcgctgaaatccaagagaaatggaaatcagccagcatgcggctggaagaacagaagaaaaaactagccttcttgttgaaagactgggaaaaatgtgagaaaggaatagcagattccctggagaaactacgaactttcaaaaagaagctttcgcagtctctcccggatcaccatgaagagctccatgcagaacaaatgcgttgcaaggaattagaaaatgcagttgggagctggacagatgacttgacccagttgagcctgctgaaggacaccctctctgcctatatcagtgctgatgatatctccattcttaatgaacgcgtagagcttctgcaaaggcagtgggaagaactatgccaccagctctccttaaggcggcagcaaataggtgaaagattgaatgaatgggcagtcttcagtgaaaagaacaaggaactctgtgagtggttgactcaaatggaaagcaaagtttctcagaatggagacattctcattgaagaaatgatagagaagctcaagaaggattatcaagaggaaattgctattgctcaagagaacaaaatacagctccaacaaatgggagaacgacttgctaaagccagccatgaaagcaaagcatctgagattgaatacaagctgggaaaggtcaacgaccggtggcagcatctcctggacctcattgcagccagggtgaagaagctgaaggagaccctggtagccgtgcagcagcttgataagaacatgagcagcctgaggacctggctcgctcacatcgagtcagagctggccaagccaatagtctacgattcctgtaactcggaagaaatacagagaaagcttaatgagcagcaggagcttcagagagacatagagaagcacagtacaggtgttgcatctgtcctcaacctgtgtgaagtcctgctgcacgactgtgacgcctgtgccactgatgccgagtgtgactctatacagcaggctacgagaaacctggaccggcggtggagaaacatttgtgctatgtccatggaaaggaggctgaaaatcgaagagacgtggcgattgtggcagaaatttctggatgactattcacgttttgaagattggctgaagtcttcagaaaggacagctgcttttcccagctcttctggggtgatctatacagttgccaaggaagaactaaagaaatttgaggctttccagcgacaggtccacgagtgcctgacgcagctggaactgatcaacaagcagtaccgccgcctggccagggagaaccgcactgattcagcatgtagcctcaaacagatggttcacgaaggcaaccagagatgggacaacctgcaaaagcgtgtcacctccatcttgcgcagactcaagcattttattggccagcgtgaggagtttgagactgcgcgggacagcattctggtctggctcacagagatggatctgcagctcactaatattgaacatttttctgagtgtgatgttcaagctaaaataaagcaactcaaggccttccagcaggaaatttcactgaaccacaataagattgagcagataattgcccaaggagaacagctgatagaaaagagtgagcccttggatgcagcgatcatcgaggaggaactagatgagctccgacggtactgccaggaggtcttcgggcgtgtggaaagataccataagaaactgatccgcctgcctctcccagacgatgagcacgacctctcagacagggagctggagctggaagactctgcagctctgtcggacctgcactggcacgaccgctctgcagacagcctgctttctccacagccttcctccaatctctccctctcgctcgctcagcccctccggagcgagcggtcaggacgagacaccccggctagtgtggactccatccccctggagtgggatcacgactatgacctcagtcgggacctggagtctgcaatgtccagagctctgccctctgaggatgaagaaggtcaggatgacaaagatttctacctccggggagctgttggcttatcaggggaccacagtgccctagagtcacagatccgacaactgggcaaagccctggatgatagccgctttcagatacagcaaaccgaaaatatcattcgcagcaaaactcccacggggccggagctagacaccagctacaaaggctacatgaaactgctgggcgaatgcagtagcagtatagactccgtgaagagactggagcacaaactgaaggaggaagaggagagccttcctggctttgttaacctgcatagtaccgaaacccaaacggctggtgtgattgaccgatgggagcttctccaggcccaggcattgagcaaggagttgaggatgaagcagaacctccagaagtggcagcagtttaactcagacttgaacagcatctgggcctggctgggggacacggaggaggagttggaacagctccagcgtctggaactcagcactgacatccagaccatcgagctccagatcaaaaagctcaaggagctccagaaagctgtggaccaccgcaaagccatcatcctctccatcaatctctgcagccctgagttcacccaggctgacagcaaggagagccgggacctgcaggatcgcttgtcgcagatgaatgggcgctgggaccgagtgtgctctctgctggaggagtggcggggcctgctgcaggatgccctgatgcagtgccagggtttccatgaaatgagccatggtttgcttcttatgctggagaacattgacagaaggaaaaatgaaattgtccctattgattctaaccttgatgcagagatacttcaggaccatcacaaacagcttatgcaaataaagcatgagctgttggaatcccaactcagagtagcctctttgcaagacatgtcttgccaactactggtgaatgctgaaggaacagactgtttagaagccaaagaaaaagtccatgttattggaaatcggctcaaacttctcttgaaggaggtcagtcgtcatatcaaggaactggagaagttattagacgtgtcaagtagtcagcaggatttgtcttcctggtcttctgctgatgaactggacacctcagggtctgtgagtcccacatcaggaaggagcaccccaaacagacagaaaacgccacgaggcaagtgtagtctctcacagcctggaccctctgtcagcagtccacatagcaggtccacaaaaggtggctccgattcctccctttctgagccagggccaggtcggtccggccgcggcttcctgttcagagtcctccgagcagctcttccccttcagcttctcctgctcctcctcatcgggcttgcctgccttgtaccaatgtcagaggaagactacagctgtgccctctccaacaactttgcccggtcattccaccccatgctcagatacacgaatggccctcctccactctgaactaagcagatgccatctgcagaagtgctggtagcataaggaggatcgggtcataagcaatcccaaactaccaacaagaggaccttgatcttggcgaaagccctcggtgtggcagctttagccctcctccagatcacatgtgtgcaaattatggcttcagaggtggaagataaacagtgacgggggaacaaacagacaacaagaaggtttggaagaaatctggtttgagactctgaaccttagcactaaggagattgagtaaggacctccaaagttccccggactcatgaattctgggcccttggcccattctgtgcacagccaaggacttcagtagaccatctgggcagctttcccatggtgctgctccaaccatcagataaatgaccctcccaagcaccatgtcagtgtcgtacaatctaccaaccaaccagtgctgaagagattttagaaccttgtaacatacaatttttaagagcttatatggcagcttcctttttaccttgttttcctttggggcatgatgttttaacctttgctttagaagcacaagctgtaaatctaaaaggcacttttttttagaggtataaagaaaaactagatgtaataaataagatcatggaaggctttatgtgaaaaaagttgaatgttatagtaaaaaaaaaaagatatttatgtatgtacagtttgctaaagccaagttttgtttgtattgatttctttgcatttattatagatattataaaat

SEQ ID NO: 2502 - protein, 3307 aa, Homo sapiens
MELDAAVQKFLEQNGQLGKPLAKKIGKLTELHQQTIRQAENRLSKLNQAASHLEEYNEMLELILKWIEKAKVLAHGTIAWNSASQLREQYILHQTLLEESKEIDSELEAMTEKLQYLTSVYCTEKMSQQVAELGRETEELRQMIKIRLQNLQDAAKDMKKFEAELKKLQAALEQAQATLTSPEVGRLSLKEQLSHRQHLLSEMESLKPKVQAVQLCQSALRIPEDVVASLPLCHAALRLQEEASRLQHTAIQQCNIMQAAVVQYEQYEQEMKHLQQLIEGAHREIEDKPVATSNIQELQAQISRHEELAQKIKGYQEQIASLNSKCKMLTMKAKHATMLLTVTEVEGLAEGTEDLDGELLPTPSAHPSVVMMTAGRCHTLLSPVTEESGEEGTNSEISSPPACRSPSPVANTDASVNQDIAYYQALSAERLQTDAAKIHPSTSASQEFYEPGLEPSATAKLGDLQRSWETLKNVISEKQRTLYEALERQQKYQDSLQSISTKMEAIELKLSESPEPGRSPESQMAEHQALMDEILMLQDEINELQSSLAEELVSESCEADPAEQLALQSTLTVLAERMSTIRMKASGKRQLLEEKLNDQLEEQRQEQALQRYRCEADELDSWLLSTKATLDTALSPPKEPMDMEAQLMDCQNMLVEIEQKVVSELSVHNENLLLEGKAHTKDEAEQLAGKLRRLKGSLLELQRALHDKQLNMQGTAQEKEESDVDLTATQSPGVQEWLAQARTTWTQQRQSSLQQQKELEQELAEQKSLLRSVASRGEEILIQHSAAETSGDAGEKPDVLSQELGMEGEKSSAEDQMRMKWESLHQEFSTKQKLLQNVLEQEQEQVKRPNRLLSGVPLYKGDVPTQDKSAVTSLLDQQAFEEVSSQSGGAKRQSIHLEQKLYDGVSATSTWLDDVEERLFVATALLPEETETCLFNQEILAKDIKEMSEEMDKNKNLFSQAFPENGDNRDVIEDTLGCLLGRLSLLDSVVNQRCHQMKERLQQILNFQNDLKVLFTSLADNKYIILQKLANVFEQPVAEQIEAIQQAEDGLKEFDAGIIELKRRGDKLQVEQPSMQELSKLQDMYDELMMIIGSRRSQQNLTLKSQYERALQDLADLLETGQEKMAGDQKIIVSSKEEIQQLLDKHKEYFQGLESHMILTETLFRKIISFAVQKETQFHTELMAQASAVLKRAHKRGVELEYITWSHLDEDQQELSRQLEVVESSIPSVGLVEENEDRLIDRITLYQHLKSSLNEYQPKLYQVLDDGKRLLISISCSDLESQLNQLGECWLSNTNKMSKELHRLETILKHWTRYQSESADLIHWLQSAKDRLEFWTQQSVTVPQELEMVRDHLNAFLEFSKEVDAQSSLKSSVLSTGNQLLRLKKVDTATLRSELSRIDSQWTDLLTNIPAVQEKLHQLQMDKLPSRHAISEVMSWISLMENVIQKDEDNIKNSIGYKAIHEYLQKYKGFKIDINCKQLTVDFVNQSVLQISSQDVESKRSDKTDFAEQLGAMNKSWQILQGLVTEKIQLLEGLLESWSEYENNVQCLKTWFETQEKRLKQQHRIGDQASVQNALKDCQDLEDLIKAKEKEVEKIEQNGLALIQNKKEDVSSIVMSTLRELGQTWANLDHMVGQLKILLKSVLDQWSSHKVAFDKINSYLMEARYSLSRFRLLTGSLEAVQVQVDNLQNLQDDLEKQERSLQKFGSITNQLLKECHPPVTETLTNTLKEVNMRWNNLLEEIAEQLQSSKALLQLWQRYKDYSKQCASTVQQQEDRTNELLKAATNKDIADDEVATWIQDCNDLLKGLGTVKDSLFVLHELGEQLKQQVDASAASAIQSDQLSLSQHLCALEQALCKQQTSLQAGVLDYETFAKSLEALEAWIVEAEEILQGQDPSHSSDLSTIQERMEELKGQMLKFSSMAPDLDRLNELGYRLPLNDKEIKRMQNLNRHWSLISSQTTERFSKLQSFLLQHQTFLEKCETWMEFLVQTEQKLAVEISGNYQHLLEQQRAHELFQAEMFSRQQILHSIIIDGQRLLEQGQVDDRDEFNLKLTLLSNQWQGVIRRAQQRRGIIDSQIRQWQRYREMAEKLRKWLVEVSYLPMSGLGSVPIPLQQARTLFDEVQFKEKVFLRQQGSYILTVEAGKQLLLSADSGAEAALQAELAEIQEKWKSASMRLEEQKKKLAFLLKDWEKCEKGIADSLEKLRTFKKKLSQSLPDHHEELHAEQMRCKELENAVGSWTDDLTQLSLLKDTLSAYISADDISILNERVELLQRQWEELCHQLSLRRQQIGERLNEWAVFSEKNKELCEWLTQMESKVSQNGDILIEEMIEKLKKDYQEEIAIAQENKIQLQQMGERLAKASHESKASEIEYKLGKVNDRWQHLLDLIAARVKKLKETLVAVQQLDKNMSSLRTWLAHIESELAKPIVYDSCNSEEIQRKLNEQQELQRDIEKHSTGVASVLNLCEVLLHDCDACATDAECDSIQQATRNLDRRWRNICAMSMERRLKIEETWRLWQKFLDDYSRFEDWLKSSTAAFPSSSGVIYTVAKEELKKFEAFQRQVHECLTQLELINKQYRRLARENRTDSACSLKQMVHEGNQRWDNLQKRVTSILRRLKHFIGQREEFETARDSILVWLTEMDLQLTNIEHFSECDVQAKIKQLKAFQQEISLNHNKIEQIIAQGEQLIEKSEPLDAAIIEEELDELRRYCQEVFGRVERYHKKLIRLPLPDDEHDLSDRELELEDSAALSDLHWHDRSADSLLSPQPSSNLSLSLAQPLRSSGRDTPASVDSIPLEWDHDYDLSRDLESAMSRALPSEDEEGQDDKDFYLRGAVGLSGDHSALESQIRQLGKALDDSRFQIQQTENIIRSKTPTGPELDTSYKGYMKLLGECSSSIDSVKRLEHKLKEEEESLPGFVNLHSTETQTAGVIDRWELLQAQALSKELRMKQNLQKWQQFNSDLNSIWAWLGDTEEELEQLQRLELSTDIQTIELQIKKLKELQKAVDHRKAIILSINLCSPEFTQADSKESRDLQDRLSQMNGRWDRVCSLLEEWRGLLQDALMQCQGFHEMSHGLLLMLENIDRRKNEIVPIDSNLDAEILQDHHKQLMQIKHELLESQLRVASLQDMSCQLLVNAEGTDCLEAKEKVHVIGNRLKLLLKEVSRHIKELEKLLDVSSSQQDLSSWSSADELDTSGSVSPTSGRSTPNRQKTPRGKCSLSQPGPSVSSPHSRSTKGGSDSSLSEPGPGRSGRGFLFRVLRAALPLQLLLLLLIGLACLVPMSEEDYSCALSNNFARSFHPMLRYTNGPPPL

SEQ ID NO: 2503 - DNA, 10893 bp, Homo sapiens
caaaaatcagtctgatctcgggaaacctggagaaatttattttctgtactctaatgttctttcattttggtgaccatcaaggtgctgggagaggaattagatggctgtaattcaaagttaatggaattagatgcagcagtacagaaattcttggaacagaatggccaactgggtaagccactggccaagaagataggaaaactgactgaacttcaccagcagaccattagacaagctgagaatcggctctccaagctcaatcaggcagcatcacatttagaagaatacaatgaaatgcttgaattaattttgaagtggattgaaaaagctaaagtcttggctcatggaactattgcatggaattctgcaagccagcttcgggaacaatatattttgcatcagaccctgctagaagaatccaaagaaattgacagtgagctggaagcaatgactgagaaattacagtacctcactagcgtgtactgtacagaaaaaatgtctcagcaagtggcagaactgggacgggagactgaggagttgcgacagatgatcaaaattcgtttgcagaacctccaagatgcagctaaggatatgaaaaaatttgaagcagagttgaaaaagttacaagctgccttggagcaagcccaggcaacactgacttctccagaagttggacgtctcagtctcaaggagcagctctctcatcggcagcatttgttgtctgagatggagtcactgaagccgaaggtgcaagcagtgcagctctgccagagtgccctccggatccccgaggatgtggttgccagcttacctctctgtcatgctgctctgcggctgcaggaagaggccagccggctgcagcacaccgccatccagcagtgtaacatcatgcaggcagctgtggtacaatatgaacaatatgagcaagaaatgaaacatctccagcaactgatagaaggagctcacagagagattgaggataaacctgttgccaccagtaacatacaggagctgcaggctcagatttctcggcatgaggagctggcgcagaaaattaagggctaccaggagcagatcgcttctttgaattccaagtgcaagatgctgacgatgaaagccaagcacgccaccatgctgctgacggtgaccgaggtcgaggggctggcggaagggacagaggacctggatggggagctcctccccacgccttcggcccacccctctgtggtcatgatgactgcaggtcgctgtcacactttgctgtcaccggtcactgaggagtctggggaggagggaaccaacagtgagatttcctctccacctgcctgtcgctccccttcacctgtggctaatacagatgcttctgttaaccaggacattgcatattaccaagccttgtctgctgagaggttgcagacagatgctgcaaaaattcaccccagcacatccgcatcccaggagttctatgaaccgggattggagccatccgctactgccaaactgggtgatttgcagcgttcttgggaaaccttaaagaatgtgatcagtgagaagcagcgcacactctatgaagctttggaacgccagcagaagtaccaggactccctccagtccatctctacgaagatggaggccattgagctgaaactcagtgagagcccagagcctggcaggagtccagaaagccagatggctgaacatcaggcattgatggatgagattctcatgctccaggatgaaatcaatgagctccagtcctctctcgcagaggagctggtatccgagtcttgtgaggccgaccctgcggagcagctggccttgcagtccacgctcactgtcttagccgagcgaatgtccaccatcaggatgaaagcctcggggaaacggcagcttttggaggagaagttgaatgatcagctggaggaacaaaggcaggaacaggccctgcagaggtatcgctgtgaagccgatgagctggacagctggctcttgagtaccaaggccactctggacactgcgctgagtccacccaaggagcccatggacatggaggcccagcttatggactgccagaatatgctggtggaaatagagcagaaggtggtggctttatcagaactgtcagtccacaatgagaacctgctgctggagggcaaagctcacaccaaggacgaggccgagcagctggctggaaagctgagaaggctcaaggggagcctgctggagctgcagagagccctgcatgataagcagctcaacatgcagggaacagcacaggagaaggaggagagcgatgttgacctaacagccacgcagagccccggcgtccaggaatggctggcccaagctcgcaccacatggacccagcagcggcagagcagtctccagcaacaaaaagagttagaacaggaattagccgagcagaagagtctccttcgctcagtagccagtcgtggagaggagattctaattcaacattcggcggcagagacctctggtgatgctggcgaaaaacctgatgtgttatcccaggagttggggatggaaggggagaaatcatccgctgaagaccagatgagaatgaaatgggaaagcctacatcaagaatttagtaccaagcagaaactactacagaatgttctggaacaggaacaagagcaagtgctttatagcaggccaaatcgactcttgtctggtgtgccactgtacaaaggggacgtgccaacccaagataaatctgcagttacatctttgctggatggactgaaccaagccttcgaggaggtttcatcccagagtggaggggcaaagaggcagagtatacacttggagcagaagttgtatgatggagtctcagccacctctacttggttggatgacgttgaagaacgtttatttgttgccacagcacttttaccagaagaaacagagacttgtctcttcaaccaagagattcttgccaaagacattaaggaaatgtctgaagaaatggataagaacaaaaacttgttttcccaagcttttccagagaatggtgataatcgagatgttattgaagatactttgggttgtcttttgggcaggttatccttgctagactcagtagtgaatcaacgatgtcatcagatgaaagaaagacttcagcaaatactaaatttccagaatgatctgaaagtgctgtttacatcactggctgacaacaaatacatcattctgcaaaaactggcaaatgtgtttgaacagcccgtagcagaacaaatagaggcaatacaacaggctgaagatggactcaaagaatttgatgcaggaatcattgaattaaagaggcgtggtgacaagctacaggtcgagcagccgtccatgcaagaactctccaagctccaggacatgtatgatgagctgatgatgatcattggctcccggaggagtggtctgaatcagaaccttacactcaagagtcagtatgagagggccctacaagatctggctgacctgctagaaactggtcaggagaagatggcaggagaccagaaaatcatcgtgtcttccaaagaggaaatccagcaactacttgacaaacataaggaatactttcagggcctggaatctcatatgatcttgactgaaacactcttcagaaagataatcagctttgcagtccaaaaggaaacccagttccatacagagctgatggctcaggcttctgctgtactgaaacgggctcacaagaggggtgtggagctggagtacattctagagacgtggtcccatctggatgaggaccagcaggagctcagcagacagctggaggtggtggaaagcagcatcccaagcgtgggtctggtggaggagaacgaggacaggcttattgaccgcataacactctaccagcatttaaaatctagccttaatgaataccagcccaaattatatcaagtattagatgatgggaaacgacttctgatatccatcagctgctcagatctagaaagccaactaaatcaacttggagagtgctggctaagtaacaccaataaaatgtctaaggaacttcacagactggaaacaatattgaaacactggaccagatatcaaagtgaatctgcagatctaattcactggttacaatctgcaaaagaccggctagaattttggactcagcaatctgtgacagtcccacaagagctggaaatggtccgtgatcatctaaatgctttcctggagttttctaaagaagtggatgcccaatcttccctgaaatcatctgttctgagtactggaaatcagctccttcgactaaaaaaggtggacacagccacgctgcgctctgagctgtcgcgcattgatagccagtggactgacctgctaaccaatatcccagccgtccaggagaagctccaccagctccagatggataaactgccttcccgccatgccatttctgaagtcatgagttggatttctctaatggaaaatgttattcagaaggatgaagataatattaaaaattccataggttacaaggcaattcatgaataccttcagaaatataagggttttaagatagacattaactgtaaacagctgacagtggattttgtgaaccagtccgtgctacaaatcagcagtcaggatgtggaaagtaagcgtagtgataagactgattttgctgagcaacttggagcaatgaataaaagttggcaaattctgcaaggtctagtaactgagaagatccagctgttggaaggcttattggaatcttggtcagaatatgaaaataatgtacaatgtctgaaaacatggtttgaaacccaggaaaagagactaaaacaacagcatcgaattggagatcaggcttctgttcaaaatgcactgaaagactgtcaggatctggaagatttgattaaagcaaaagaaaaagaagtagagaaaattgagcagaatggacttgctttgattcagaacaagaaagaagacgtctctagcattgtcatgagcacactgcgagagctcggccaaacctgggcaaatttagatcacatggttggacaattaaagatactgctgaaatcagtgcttgaccaatggagtagtcacaaagtggcctttgacaagataaacagttacctcatggaggccagatactctctttcccgattccgtctgctgactggctccttagaagctgtgcaagttcaggtggacaatcttcagaatctccaagatgatctggaaaaacaggaaaggagcttacagaaatttggctctatcaccaaccaattattaaaagagtgtcacccacccgtgacagaaactcttaccaatacactgaaagaagtcaacatgagatggaataacttgctggaagagattgctgagcagctacagtccagcaaggccctacttcagctttggcaaagatacaaggactactccaaacagtgtgcttcgacagttcagcagcaggaggatcgaaccaatgagctgttgaaggcagccacaaacaaggacattgccgatgatgaggttgccacatggattcaagattgcaacgacctcctcaaaggactgggcacagttaaagattccctctttgttctccatgagctgggagagcaactgaagcaacaagtggatgcttccgcagcatcagctattcaatcggatcaactctctttgagtcaacacttgtgtgccctggagcaagctctctgcaaacagcagacttcattacaggctggagttcttgattatgaaacctttgccaagagtttagaagctttggaggcctggatagtggaagctgaagaaatactacaagggcaggaccctagccactcatctgacctctccacaatccaggaaaggatggaagaacttaagggacagatgttaaaattcagcagcatggctccagatttagaccgtctaaatgagcttggatataggttacccttgaatgataaggaaatcaaaagaatgcagaatctgaaccgccattggtctctgatctcctctcagactacagaaagattcagcaagttgcagtcatttttgctacaacatcagactttcttggaaaaatgtgaaacatggatggaattcctagttcagacagaacaaaagttagcagtagagatttcaggaaattatcagcaccttttggaacagcagagagcacacgagttgtttcaagccgagatgttcagtcgtcagcagattttgcactcaatcattattgatgggcaacgtcttctagaacaaggtcaagttgatgacagaattcaacctgaaattgacactcctcagtaatcaatggcagggagtgattcgcagggcccagcagaggcgggggatcattgacagccagattcgccagtggcagcgctatagggagatggcagaaaagcttcgtaaatggttggttgaagtgtcctacctccccatgagtggtctcggaagtgttcctataccactgcaacaagcaaggaccctctttgatgaagtgcagttcaaagaaaaagtgtttctgcggcaacaaggcagctacatcctgactgtggaggctggcaagcaactccttctctcggcggacagtggcgctgaggccgccttgcaggccgaactcgctgaaatccaagagaaatggaaatcagccagcatgcggctggaagaacagaagaaaaaactagccttcttgttgaaagactgggaaaaatgtgagaaaggaatagcagattccctggagaaactacgaactttcaaaaagaagctttcgcagtctctcccggatcaccatgaagagctccatgcagaacaaatgcgttgcaaggtaaattactgaattgggagctggacagatgacttgacccagttgagcctgctgaaggacaccctctctgcctatatcagtgctgatgatatctccattcttaatgaacgcgtagagcttctgcaaaggcagtgggaagaactatgccaccagctctccttaaggcggcagcaaataggtgaaagattgaatgaatgggcagtcttcagtgaaaagaacaaggaactctgtgagtggttgactcaaatggaaagcaaagtttctcagaatggagacattctcattgaagaaatgatagagaagctcaagaaggattatcaagaggaaattgctattgctcaagagaacaaaatacagctccaacaaatgggagaacgacttgctaaagccagccatgaaagcaaagcatctgagattgaatacaagctgggaaaggtcaacgaccggtggcagcatctcctggacctcattgcagccagggtgaagaagctgaaggagaccctggtagccgtgcagcagcttgataagaacatgagcagcctgaggacctggctcgctcacatcgagtcagagctggccaagccaatagtctacgattcctgtaactcggaagaaatacagagaaagcttaatgagcagcaggagcttcagagagacatagagaagcacagtacaggtgttgcatctgtcctcaacctgtgtgaagtcctgctgcacgactgtgacgcctgtgccactgatgccgagtgtgactctatacagcaggctacgagaaacctggaccggcggtggagaaacatttgtgctatgtccatggaaaggaggctgaaaatcgaagagacgtggcgattgtggcagaaatttctggatgactattcacgttttgaagattggctgaagtcttcagaaaggacagctgcttttcccagctcttctggggtgatctatacagttgccaaggaagaactaaagaaatttgaggctttccagcgacaggtccacgagtgcctgacgcagctggaactgatcaacaagcagtaccgccgcctggccagggagaaccgcactgattcagcatgtagcctcaaacagatggttcacgaaggcaaccagagatgggacaacctgcaaaagcgtgtcacctccatcttgcgcagactcaagcattttattggccagcgtgaggagtttgagactgcgcgggacagcattctggtctggctcacagagatggatctgcagctcactaatattgaacatttttctgagtgtgatgttcaagctaaaataaagcaactcaaggccttccagcaggaaatttcactgaaccacaataagattgagcagataattgcccaaggagaacagctgatagaaaagagtgagcccttggatgcagcgatcatcgaggaggaactagatgagctccgacggtactgccaggaggtcttcgggcgtgtggaaagataccataagaaactgatccgcctgcctctcccagacgatgagcacgacctctcagacagggagctggagctggaagactctgcagctctgtcggacctgcactggcacgaccgctctgcagacagcctgctttctccacagccttcctccaatctctccctctcgctcgctcagcccctccggagcgagcggtcaggacgagacaccccggctagtgtggactccatccccctggagtgggatcacgactatgacctcagtcgggacctggagtctgcaatgtccagagctctgccctctgaggatgaagaaggtcaggatgacaaagatttctacctccggggagctgttggcttatcagatgtaatgatccccgaaagccctgaggcctatgtaaaactcacagaaaatgcaatcaaaaatacctccggggaccacagtgccctagagtcacagatccgacaactgggcaaagccctggatgatagccgctttcagatacagcaaaccgaaaatatcattcgcagcaaaactcccacggggccggagctagacaccagctacaaaggctacatgaaactgctgggcgaatgcagtagcagtatagactccgtgaagagactggagcacaaactgaaggaggaagaggagagccttcctggctttgttaacctgcatagtaccgaaacccaaacggctggtgtgattgaccgatgggagcttctccaggcccaggcattgagcaaggagttgaggatgaagcagaacctccagaagtggcagcagtttaactcagacttgaacagcatctgggcctggctgggggacacggaggaggagttggaacagctccagcgtctggaactcagcactgacatccagaccatcgagctccagatcaaaaagctcaaggagctccagaaagctgtggaccaccgcaaagccatcatcctctccatcaatctctgcagccctgagttcacccaggctgacagcaaggagagccgggacctgcaggatcgcttgtcgcagatgaatgggcgctgggaccgagtgtgctctctgctggaggagtggcggggcctgctgcaggatgccctgatgcagtgccagggtttccatgaaatgagccatggtttgcttcttatgctggagaacattgacagaaggaaaaatgaaattgtccctattgattctaaccttgatgcagagatacttcaggaccatcacaaacagcttatgcaaataaagcatgagctgttggaatcccaactcagagtagcctctttgcaagacatgtcttgccaactactggtgaatgctgaaggaacagactgtttagaagccaaagaaaaagtccatgttattggaaatcggctcaaacttctcttgaaggaggtcagtcgtcatatcaaggaactggagaagttattagacgtgtcaagtagtcagcaggatttgtcttcctggtcttctgctgatgaactggacacctcagggtctgtgagtcccacatcaggaaggagcaccccaaacagacagaaaacgccacgaggcaagtgtagtctctcacagcctggaccctctgtcagcagtccacatagcaggtccacaaaaggtggctccgattcctccctttctgagccagggccaggtcggtccggccgcggcttcctgttcagagtcctccgagcagctcttccccttcagcttctcctgctcctcctcatcgggcttgcctgccttgtaccaatgtcagaggaagactacagctgtgccctctccaacaactttgcccggtcattccaccccatgctcagatacacgaatggccctcctccactctgaactaagcagatgccatctgcagaagtgctggtagcataaggaggatcgggtcataagcaatcccaaactaccaacaagaggaccttgatcttggcgaaagccctcggtgtggcagctttagccctcctccagatcacatgtgtgcaaattatggcttcagaggtggaagataaacagtgacgggggaacaaacagacaacaagaaggtttggaagaaatctggtttgagactctgaaccttagcactaaggagattgagtaaggacctccaaagttccccggactcatgaattctgggcccttggcccattctgtgcacagccaaggacttcagtagaccatctgggcagctttcccatggtgctgctccaaccatcagataaatgaccctcccaagcaccatgtcagtgtcgtacaatctaccaaccaaccagtgctgaagagattttagaaccttgtaacatacaatttttaagagcttatatggcagcttcctttttaccttgttttcctttggggcatgatgttttaacctttgctttagaagcacaagctgtaaatctaaaaggcacttttttttagaggtataaagaaaaactagatgtaataaataagatcatggaaggctttatgtgaaaaaagttgaatgttatagtaaaaaaaaaaagatatttatgtatgtacagtttgctaaagccaagttttgtttgtattgatttctttgcatttattatagatattataaa

SEQ ID NO: 2504 - protein, 2053 aa, Homo sapiens
MELDAAVQKFLEQNGQLGKPLAKKIGKLTELHQQTIRQAENRLSKLNQAASHLEEYNEMLELILKWIEKAKVLAHGTIAWNSASQLREQYILHQTLLEESKEIDSELEAMTEKLQYLTSVYCTEKMSQQVAELGRETEELRQMIKIRLQNLQDAAKDMKKFEAELKKLQAALEQAQATLTSPEVGRLSLKEQLSHRQHLLSEMESLKPKVQAVQLCQSALRIPEDVVASLPLCHAALRLQEEASRLQHTAIQQCNIMQAAVVQYEQYEQEMKHLQQLIEGAHREIEDKPVATSNIQELQAQISRHEELAQKIKGYQEQIASLNSKCKMLTMKAKHATMLLTVTEVEGLAEGTEDLDGELLPTPSAHPSVVMMTAGRCHTLLSPVTEESGEEGTNSEISSPPACRSPSPVANTDASVNQDIAYYQALSAERLQTDAAKIHPSTSASQEFYEPGLEPSATAKLGDLQRSWETLKNVISEKQRTLYEALERQQKYQDSLQSISTKMEAIELKLSESPEPGRSPESQMAEHQALMDEILMLQDEINELQSSLAEELVSESCEADPAEQLALQSTLTVLAERMSTIRMKASGKRQLLEEKLNDQLEEQRQEQALQRYRCEADELDSWLLSTKATLDTALSPPKEPMDMEAQLMDCQNMLVEIEQKVVSELSVHNENLLLEGKAHTKDEAEQLAGKLRRLKGSLLELQRALHDKQLNMQGTAQEKEESDVDLTATQSPGVQEWLAQARTTWTQQRQSSLQQQKELEQELAEQKSLLRSVASRGEEILIQHSAAETSGDAGEKPDVLSQELGMEGEKSSAEDQMRMKWESLHQEFSTKQKLLQNVLEQEQEQVKRPNRLLSGVPLYKGDVPTQDKSAVTSLLDQQAFEEVSSQSGGAKRQSIHLEQKLYDGVSATSTWLDDVEERLFVATALLPEETETCLFNQEILAKDIKEMSEEMDKNKNLFSQAFPENGDNRDVIEDTLGCLLGRLSLLDSVVNQRCHQMKERLQQILNFQNDLKVLFTSLADNKYIILQKLANVFEQPVAEQIEAIQQAEDGLKEFDAGIIELKRRGDKLQVEQPSMQELSKLQDMYDELMMIIGSRRSQQNLTLKSQYERALQDLADLLETGQEKMAGDQKIIVSSKEEIQQLLDKHKEYFQGLESHMILTETLFRKIISFAVQKETQFHTELMAQASAVLKRAHKRGVELEYITWSHLDEDQQELSRQLEVVESSIPSVGLVEENEDRLIDRITLYQHLKSSLNEYQPKLYQVLDDGKRLLISISCSDLESQLNQLGECWLSNTNKMSKELHRLETILKHWTRYQSESADLIHWLQSAKDRLEFWTQQSVTVPQELEMVRDHLNAFLEFSKEVDAQSSLKSSVLSTGNQLLRLKKVDTATLRSELSRIDSQWTDLLTNIPAVQEKLHQLQMDKLPSRHAISEVMSWISLMENVIQKDEDNIKNSIGYKAIHEYLQKYKGFKIDINCKQLTVDFVNQSVLQISSQDVESKRSDKTDFAEQLGAMNKSWQILQGLVTEKIQLLEGLLESWSEYENNVQCLKTWFETQEKRLKQQHRIGDQASVQNALKDCQDLEDLIKAKEKEVEKIEQNGLALIQNKKEDVSSIVMSTLRELGQTWANLDHMVGQLKILLKSVLDQWSSHKVAFDKINSYLMEARYSLSRFRLLTGSLEAVQVQVDNLQNLQDDLEKQERSLQKFGSITNQLLKECHPPVTETLTNTLKEVNMRWNNLLEEIAEQLQSSKALLQLWQRYKDYSKQCASTVQQQEDRTNELLKAATNKDIADDEVATWIQDCNDLLKGLGTVKDSLFVLHELGEQLKQQVDASAASAIQSDQLSLSQHLCALEQALCKQQTSLQAGVLDYETFAKSLEALEAWIVEAEEILQGQDPSHSSDLSTIQERMEELKGQMLKFSSMAPDLDRLNELGYRLPLNDKEIKRMQNLNRHWSLISSQTTERFSKLQSFLLQHQTFLEKCETWMEFLVQTEQKLAVEISGNYQHLLEQQRAHELFQAEMFSRQQILHSIIIDGQRLLEQGQVDDRIQPEIDTPQ

SEQ ID NO: 2505 - DNA, 3655 bp, Homo sapiens
cggccgccggccgcagcgggctgagattgttgtcctctgtcaccagggcggctgggctcccgcagtcctgcagaccgcgcccgatcccggcgacagggcgggcggacagccgcgcatccccggggtcccgccgagcctgggcgcagagagccgggaggaagcgttcgctcgcttcgccttgctgctgggaaactgaacgaggccgagagagaaggttcttgagttcatgtaagaggacagtcttaaaacggaagaagaaaaagaagcagttcagtctttgggagagctgcctccttgttgagtgctgcaaaggcctggaattcatttatgacagaatagatctagaaaagtccaagcatgttttctagagtggtgtagccctgtgctgcctccagtgaagagtctcttggtgttggcttcgtgcttccggagggaccatggcaacctccagaggggcctcccggtgtcctcgggatatcgccaatgtgatgcagaggctgcaagatgagcaagagatagtacaaaaacgaactttcacaaaatggatcaactctcatctggccaagcggaaacctccaatggtggtggacgatctttttgaagacatgaaagatggtgttaaactgcttgcccttctggaggtcctgtctgggcagaaactgccttgtgaacaaggacgccggatgaagcgaatccatgctgtggctaacattggcacggcactcaagttcctcgaaggaagaaagtccatgcacagaggatcaccgattaaattagtcaacattaactccaccgatatagctgatggccgaccctcaatagttcttggattgatgtggaccattattctatatttccagattgaagagttgaccagcaacctgccccagctccagtctttgtccagcagcgcatcctccgtggacagcatagttagctctgagactcccagcccaccaagtaaacggaaggtgaccaccaagatccaaggaaatgctaagaaggctttattaaagtgggttcagtacacagctggcaagcagactggaatagaagtaaaagattttgggaagagttggagaagcggggttgcctttcattcagttattcatgccattcgaccggaattggtggacttggagacagtgaaaggcagatccaaccgagaaaatttggaggatgctttcactatcgccgaaacagaactggggatcccaagactgctagatcctgaagacgttgatgtggataaaccagatgagaaatctattatgacctatgtagcccagtttctgaaacattatcctgacatccacaatgcaagcactgatgggcaagaggatgatgaaatacttccaggtttcccatcttttgcaaattctgtacaaaattttaagagagaagacagagtaatttttaaggaaatgaaagtttggatagaacaatttgagagagatttgacaagagcacagatggtggaatcaaatttacaggataaatatcagtcatttaagcacttcagagttcaatatgaaatgaagaggaaacagattgaacatttaatacaaccattacacagagacggtaaattgtcacttgaccaagcattggtaaaacaatcttgggatagagtgacctccaggctctttgactggcatatacagcttgataaatctcttcctgcacctctgggcaccataggtgcctggctgtacagagcggaggtggccctgagagaggaaataaccgttcaacaggtccacgaggaaacagcaaacacgatacaacggaaacttgagcaacataaggatctgcttcaaaacacggatgcccacaaaagagcattccatgaaatctaccggaccaggtctgttaacgggattccagtgccacctgatcaattagaggacatggccgagaggtttcattttgtttcctccacatcagagctacacctaatgaaaatggaatttttagaattaaagtaccgtctgctctcactgctggttcttgcagagtcaaagctgaagtcttggatcattaagtacgggaggagagagtcagtggagcagcttctacaaaactacgtgtcttttatagaaaatagcaagttctttgaacaatatgaggtgacataccagatcttgaaacagacagctgagatgtatgtcaaagcagatggttcagtggaagaagctgagaatgtgatgaaattcatgaatgaaaccaccgctcagtggaggaatctctcagtagaagtgaggagtgtgaggagcatgctggaagaagtgatctctaactgggatcgctatggcaatacagtggctagtctgcaagcctggctagaggatgctgaaaaaatgctcaatcaatcagaaaatgccaaaaaggatttttttcgaaatttacctcattggattcagcagcatactgccatgaacgatgctggcaattttctaattgaaacctgtgatgagatggtttcccgtgacctgaagcagcaattactgttgctaaatgggcggtggagggagttgtttatggaagtcaagcaatatgctcaagctgatgagatggacagaatgaagaaggaatacacagactgtgttgttaccctgtctgcttttgcaacggaagcccataagaaactttctgaacccttagaagtctcttttatgaatgtcaagctattaattcaagacttggaggatattgagcagagggtgcctgtgatggatgcccaatacaagataattacaaagacagcacacctcattaccaaagaaagcccccaagaagaaggaaaagaaatgtttgcgaccatgtcaaagctcaaagagcagctaaccaaggtcaaagaatgttactccccactcctttatgagtctcagcagctgttgattccgttggaggaattagaaaagcagatgacgtccttttatgactcacttgggaaaatcaatgaaattatcacagttcttgagcgtgaggcacaatcgagtgccctttttaaacaaaaacatcaggaactgttagcttgtcaagaaaactgtaagaaaaccttgacacttattgagaaaggcagtcaaagtgttcaaaagtttgtgaccttgagcaacgtgttaaagcattttgatcagacgaggctacaaagacagattgcagatattcatgttgcttttcagagtatggtaaagaaaactggagattggaagaagcatgtggaaaccaacagtcgcttgatgaagaagtttgaggagtctcgagcagagttggagaaggtactgcggattgctcaggagggcctggaggaaaagggggatccagaggagctcctgcggagacacactgagtttttcagtcagctggatcagagggtgctcaatgctttcctgaaagcttgtgatgaactcaccgacatccttccagagcaggagcagcaggggctgcaggaagctgttcgaaagctccacaaacaatggaaggtgagtcaggacaggacggagacaccgtgcatcctcaatgaagggagaagcttgagcgtgttaaggtccaaatgtaagagaaatttagaaattcctggaaagtcactgtaactatttcgctcatttaaaaactcaaaaaactggacttaaataaaacctgataatatatg

SEQ ID NO: 2506 - protein, 1048 aa, Homo sapiens
MATSRGASRCPRDIANVMQRLQDEQEIVQKRTFTKWINSHLAKRKPPMVVDDLFEDMKDGVKLLALLEVLSGQKLPCEQGRRMKRIHAVANIGTALKFLEGRKSMHRGSPIKLVNINSTDIADGRPSIVLGLMWTIILYFQIEELTSNLPQLQSLSSSASSVDSIVSSETPSPPSKRKVTTKIQGNAKKALLKWVQYTAGKQTGIEVKDFGKSWRSGVAFHSVIHAIRPELVDLETVKGRSNRENLEDAFTIAETELGIPRLLDPEDVDVDKPDEKSIMTYVAQFLKHYPDIHNASTDGQEDDEILPGFPSFANSVQNFKREDRVIFKEMKVWIEQFERDLTRAQMVESNLQDKYQSFKHFRVQYEMKRKQIEHLIQPLHRDGKLSLDQALVKQSWDRVTSRLFDWHIQLDKSLPAPLGTIGAWLYRAEVREEITVQQVHEETANTIQRKLEQHKDLLQNTDAHKRAFHEIYRTRSVNGIPVPPDQLEDMAERFHFVSSTSELHLMKMEFLELKYRLLSLLVLAESKLKSWIIKYGRRESVEQLLQNYVSFIENSKFFEQYEVTYQILKQTAEMYVKADGSVEEAENVMKFMNETTAQWRNLSVEVRSVRSMLEEVISNWDRYGNTVASLQAWLEDAEKMLNQSENAKKDFFRNLPHWIQQHTAMNDAGNFLIETCDEMVSRDLKQQLLLLNGRWRELFMEVKQYAQADEMDRMKKEYTDCVVTLSAFATEAHKKLSEPLEVSFMNVKLLIQDLEDIEQRVPVMDAQYKIITKTAHLITKESPQEEGKEMFATMSKLKEQLTKVKECPLLYESQQLLIPLEELEKQMTSFYDSLGKINEIITVLEREAQSSALFKQKHQELLACQENCKKTLTLIEKGSQSVQKFVTLSNVLKHFDQTRLQRQIADIHVAFQSMVKKTGDWKKHVETNSRLMKKFEESRAELEKVLRIAQEGLEEKGDPEELLRRHTEFFSQLDQRVLNAFLKACDELTDILPEQEQQGLQEAVRKLHKQWKVSQDRTETPCILNEGRSLSVLRSKCKRNLEIPGKSL

SEQ ID NO: 2507 - DNA, 43863 bp, Mus musculus
  misc_feature (1)...(43863): n = A, C, G or T/U
taatataatgtcttccattcattttctaaacttcatgagaatcatgagtgggaaaataaataaagttctaaaaaatttggtttttttaatttgagatttcttctttttcttttttatttctgtttatttttttccatgtaggagctggagatcacactccggtcccctggaagagcagacagttcattagcccatttattaattggataatttagcttggagtatttaatttttacaattctttatatatttcagatattaaccccagtctgatgtggtagttggcaaactcttttcacatcctggattttttccttctatatagatcatttcattttatgtaactcagtaaaaccttgagatcatttcttgtgctgcaagagttgaactcagaaaggttttgcctatgtttatatcttgaagtgttttccttaagtagtttcaaggcttcaggtcttgcatttagacttttgaatgtgtgtgtgtgtgtgtgtgtgtgtgtgtatgtatgtatgtatgttatatgaatgagtgcagtgatgctcatgcccatgtgtagcacatgcagaggccagaggacgatgttgaatgtctccatcattctatgccttcctttgaaacagggtctcccgcagcacctaccgcttgttatttgggctaggttggctggctagagggatctgcctgtctctgctcctcaacttactgtgttcttgaatttgatttataagtactgtattgagaatttttgtatctatattcatttgggaaattcatgtatgcttttctgtcttttaagaaagtacttttggggctggtgagatggctcaatgggtaagagcactgactgctcttccgaaggtcctgagttcaaatcccagcaactacatggtggctcacacccacccataatgagatctgacaccctcttctggtgtgtctgaagacagctacagtgtacttatttatactaataaataaatctttggggaaaaagtacttttatctgggtatcatgataatactgattaataatgcaaaaaaagaatataaaaatctgtcaggaaaaatactaacttgtctgcaaaggcatacacataggggtaacattagatttatcctcggtaactcagaaaatcaataaatttaaagaacacacactagctaactaggccacacaaacaaacaaacaaacaaacaaacaaacaaacaaacactgttttcaagaaacttgcccttattggcaaaagctcccggaaaccaaaagtcaaaggatagatgtcaacttatcaagtcaatggaagctcaaaccaagctaagtagttgttctgatatctgatggaataaactttgaactaagactaattagaaatataaaagggcaactaaatattagtcaagagaaaaatctatccagaaactagaataattataaatatatgcatcaattttttgacttcctgatttcataaaatactttaaagaatgaaagaccagattggtcttgacacaataatatagagtgaatttaatacctcaccccatctttagctaggtatcaaataaataaataaatcaatgaagaaacttcagagctaaatcagaacaaagattggatttaacaagtagcttctaagtattctgtctaacctagagccttttctaaaactaagcactttattgcccataaaactagctttaacaaatataaacaaattgaaataatttcttgtgtcttatcagatcatagtgtaataaaactgttgttgttaacaacaaaagacaccacagaacagacacagaaatataaagactgaacaacctgcttttgagtgatcaatgtgccattgaatgatgtcagcaaaaaaatgtttaaaattcccgtaatcaaataaaaatgataacacagcgtattgggagctctgtgatacagctaaggcatttctaaaaggaatgttttaacagtgagcacttacattaaaaacatagggctgcagaggcagcttataggttaagaacatttgctattcttgcaacgaactggggttctgttcccagcatccataatgcagctcacaaccgtctgtaactctagtcccagggatgcatcattctttcctggtttccattggcattgcatgcacatcatactcatacatggaggtaagaacacaaaacaaaaacaaacacatcttcgaaacaatagagatctggcgagttgttgttagagtctgaaaatcaccacatacaccactcagactgatctccgtcaaaaagggatggcttaatgaacgccacaccccaaggctgatcgatcagggtcacaggtcacactccagagttgactatgacatcaaattaagattctacatggtttttaagcctaaaatctacaaacatctgtgccaagttattccactgatcaggatttaaggataggggatttccttaagaacatgtcattgttgtacacttatcctgctcccactgattgaggtattcaactgtggcaggggacttgccttgcctaatattcatgtcttaacttgttgtggtggtttgaatatgcttggcccagagagtgtcaagttattaggaggcatggcctggttggaggaggtgtggccttgttggaggaagtgtgtcaccgtgggcttgggctttaagaccctcatcctagctgcttggaagccaatcttctcctagtggccttcagatgaagatgtcgaactctcagctcctcctgcaccatgcctatctgggtgcttccatgttcccatcttgatgataagggactaatcctctgaacctgtaagtcagttccaatgaaatgttctccttataggagttgccttggtcatggtatctgttcacagcactaaacactaagacacttgccagccaggatgtcagtaacctgggtaatatgtctcattctaccaggtaggatatcagtttccagggaggtcttgggaacttaaactttactccacccctactcagaatggaagtcttattccaaatagtttcttatattgatgtgggtgtctctcttatgttcaggcctataccatgggcagtttatggaaacaaataccataaagcttattcacaggtgcaggaagagctgctgggtagttggttcgggtccaagtttattgtggctaactatacaaagttgttctgctgacttctatcatgattagttttcaagagtatggatcataacagaacatgtaatcaacttgggtatgggaaagtttcctagtaacagcagaaacaacatataagaaagttttcttataatattaacaacagcacaaaatggcagactagctaggtaacagttacatagtccttaacattttacacaggccttaacattctgtctaggacttaatattttacctaggcctgaagaggtatagtgggtttaattacagcatttaagaagcagagacaggcagatttctgtgggttttaagccagcctggtgtatataaaaagttccaggcttcctcctcctcctcctcctcctcttcctcctcaccattactttccagtgcttagaaccaagtcctccaactccagtcaagtgctcttccactgatcaacactcccaggacttctcaccataattcatactacccaaagtatgaaaccataaagaaaaccaggtgtaggttgccttagtcagggtttctattcctgcacaaacatcatgaccaagaagcaagttggggaggaaagggtttattcagcttacacttccacattgctgttcatcaccaaaggaagtcaggactggaactcaagcaggccagaaagcaggaactgatgcagaggccttacttcccctggcttgttcagcctgctctcttatagaaccaagactaccagcccagagatggcaccacccacaaaggggcctttccccgtttgatcactaattgagaaaatgccttacagctggatctcatggaggcatttccccaactgaagctcctttctctgtgataactccagctgtgtcaaattaacacaaaactagacagtacgtaggtatacaacatactgctattcagacttaaaagaaatgggatttggatgtatgctagaagacagatgaacattaaaggtgttatggtaagtggagcaaaagccagtcacaaaaggacacattgatatctgtaaaatatgtttgctgcaggcttgagaagagcatacagagctagtgtttatggatagagggttgcagtcaatgtattagccagggttctctagagtcacagaacttatgggtcatttctctatagtaagggaatttgttatgatgacttacagtctgcagtctaactccccaacaacggtcagctgtgaatgggaagtccaaggatctagtagttgctcagtcccacccggctaggataatccaacagatgtgctggcaagtaaatttaagcaggcagaagaagagtgaatcttccttcttccaatgtccttatgtaggtctccagcagaaggtatgtcccagattaaaagtgtgtaccaccatgtctggatctggaacttgttttgtcccagatgaccttgaactcagagatctccctgtcttagtcttatgggattcatagccactatgcttcaagatatccatgccaagacccaggtcagaaacttgtatctcccagccgcaagatctggatcacaggtgagccttccaattctggattatagttcattccagatatagtcaagttgacaaccaggaatagccacttcagtcaagaagatgaaaacgttctggagaggcacaatcattgacaatttcataacaatgtgactgcacttggtgtccctcaactgtacatcttaacgtggttgcagcataaatgttctactatatcacagtttgttttttttttttaaaaagattcattgtcctcacggagttataaaacccagtgtggaagagaaatgaagttcatgatgattgtttggcgcagggatgcagagttactccatagccaaggtctgttggatgtgctgtgtgcagtttagatggctggaccttctgcccttgagcgtcaatgggtctgggagcccattagacacatggcagtgtctcagactcatctgatcaactgcctccttggcaacttgacaaactggaagtgtcgaaaataaaattcttaggatgagggtgtgcttgctgtgtttgcctacatgcactgctgttgagtgttcaccagcaaagaccactcaggcatgggtttaagtcaatagaacgtctttgttagccagctggtgactacactggatgttctgggatccacgcctttctcaggatgagcttttaggtctcccaaaccatgttatgggtggaaatgcttcaggcatcaagaagagttagctaagccgggcggtgggggtgtatgcctttagtcccagcacttgggaggcagaggcaggcagatttctgagttcgaggccagcctggtctacagagtgagttccaggacagccagggctacacagagaaaccctgtctcaggggaaaaaaaaaaaggagaagaagaagagttagacagaagtagaactacagaagccaaaaaagcaaagttagcacatttagagactttcccagaaggatcacacctctgttttagctctgtcaatggtgctatctatgttctgagttttatagcctgcattgcacctctatcatggagtcagttggaataaagtctactttaaagggaacatactaaggtctaggaacctatttcttgcatgaagctctaggttcaattccccacatagaaccaggcatggtggtgtatgcctgtgatctcagcactccaggaaattgctccagaatgatcagaagttcagggtcacccttgtggtcaatttctaaggtcagcttgtgacacatgagactctttctctaaaagtggggatgggtgattatctgttgggcaatgaactttgtatggtttttgtatgagtatatgaatgtgggtgcacatatatgtgcatgcatgcatgtagaaaatggttatcttcctccattacattctacctctgtgtgtgtgtgtgtgtgtgtgtgtgtcttgctaacacaaggctcatcagttggctaagctggcttgctggtgaatccatgaatctacctgtctctgcctcccacccccatactgactgactcctgtgcgtttacagaagccaactatggtgccaaccttcttatatgcatcctatggatccaagcacaggtcctcatgctttcctggcagatgatgtactgataaagccatctgcttctggccccaccacaaacgcaccaaaatggacttcttacatgccagtatcctctgttcccacattctcacaacttttgaggtggtcttcctagatctgcataggtgccccttttctactagatgctcatttttcttttctttttcccatcccccagctagtttctcatttttcactcccctttctcatgccctttatccttttaccacagttttcttgtgaacgtggccagaaccccgtggcttcttacttgtttttccactctggtttcttgtgattcaagattttccagcaaagcagaacaaatagaagatacagagagctgtcctatacatatgcctgtgcatggtaaggaattggctcgtgcatttatggaagctgggaagtcccaagagctttggtcaacagactggtaacccagaagtcatcatgcagttccaggctgattcagaaggctgggggagcagaagagcccataggggacattccagtcttcacttaagtccaaagagaattccaaggtctcctttcagagacagacagacaaaggaattgacccttagccattttttttttttttttttttttttttttgccttcaggagtaggtataaagccaccttgcactggagagggcaatgtgctttactgaatttaaccctatgcaaaagtcaccctaatggccaaacctagaataatgtctggctattctgtgacccagtcaaatttagaaagaaatatctgccactgtttactaacacatccaagtgcttctctttgtctccaatcttgcctcaacagaatggtggatgatggaaaagccacgtcatgtctcccttctgctctaagttcttctttgtaccgcatctcagtggaagccaaattttgaccatgatgttctccatgccatcttctccatcttagcccaccacctgccactctaccctctgcatcccaggaaagcaagcatgttccagctgcaggattatgacatctgcacctaccaggtcccaaaggtccacatcaaagtactgtggagattgcatcctccctcagagcatagagtgcccattatccttgttttagttctttttcaaataatcagtgctagggaggggaagggtgtaggttggtgaacaaactaaagtctatcatacttaaggcctttgttcatatgccagcacaagttaaaagccattttagaacacttttatattcacacacacacacacactcttgtacacacacacacacacacacacacacacaagttgccgaactgatgctgtcccatattttctgttctaggttccccttctatcaccatcatacattaagaggacagattcatcctggctgagaagccagcctcctccctccctccttattaaggttccaggcacattcccctaatgttttgttttcatttccgaagattcctttcttttattttatatatgggaatgttttgccttcatctaccatgtgcatatcatgtgtgtgcctggcaccaacagaggttaggagaggcattggatcacctggaactggagttagtaaggaccatgttggtgctgtgaaccaaactcaggtcctctgcaagagcattgagtgctgggtcatctcccagaccctttgtttttgtttaattcctaatcccgcctctcagccatctcaggatcttctgtggcagtttaagattcctttctaatgtttgttgtacgacctttcaacagctgtgagtaatattggtcaggcatttttgcgggtgggggtgggggagtgcaagtggatttgtgcttgttgagccagaggcaacctctactcactgtcataacatcatttatcacctttgaaactaggtctcttactggcagggaacttcccaatgatttaagcctggctggtctcctgcctcaccaaggctctgcaggcacatttttatgtaggttgtggggaatcttagctcctcgagctaaagggtaactgcagtatcccctgagctatcacccaggcccatagctagggaggtttaagggtgttgggttgctaggcttcattggatatttccttcatgataagactacggtgagctgggagacagtgctgtacgcctttaatccaagtacttgcaggtggatctctgagttcgaggccagcctggtctacagagtgagttccaggacagccagggctacacagagaaaccctgactcaaaaaaacaaaacaaaacaaatgaaaagcaaaacaaaacagaaggctggggcatggaggagaaaggccccaaggataaagtgttacctctacctggctttaagtatctgaccttgtgtattgggtgaactgtgtggctgctctgtgtgtggtaaaaactactttccgtctcctttccatacagtcctctgttgaggtgaggagcaggctggcccacacttagagtgcagagacaagcttcttttccatgaaagtggagtttctgcttaagttgcctgaagttgctctgccccggagatttgtctttctggccttacctggccttacattagtagatctattcatcggtcatttcacattagatggataactttgggttaccgtaacaccttgttcctcaaattcttctggcggtggcttcctatcaatgcatatcatctttctttcttcctgtgttctttttttaagatttattaaatattatttattattatatgtaagtacactgtagctgtgtctttcagatacaccagagaagggcgtcagatttcattatggatgttgtgagccactgtgagccaccatgtggttgctgggatttgaactcaggacctttagaagagcagtcagcgctcttaaccactgagccatctctccagcccctcctctcatactttctttgtttcttgatggctagccttctaccttgtttgtccagcggtttcccaccccctagccagaatgccccttttctgtttctgagcccccagtagggtgccaggcaacgaggacaaggtcgtggcaatactcctgtgggtgtcccactgacagcaggcaggaaggggctagtggaaggcggggctcagtgtctacgtggtccacaacctcgggttaggcagtcgtgcgggtccccgctggcgcagccacacccacgctcagaaacggtttctagtgccctagtttcggaactactctggactgcaaaagtcatccgcgctgaggggttttcccgcggaaagtccgatggatcccgccccgcccatctctccatcccagagcaaggaagaagaaagagcaagttcccgggtggtccacaccgtcgcccgcagcatctcggggtgcacaggaggggaagaaggctcgtgcttaggttcccagcaacccgcagcgtggcgaccccagtcgggacgggaagctgcgcgcctagccgagggcgtccccggggcggggccctggtccccagctgtgcagcctcagcgcggcaggggcggagccagcagcaccagacgcggccctgcggctcagggctcggaccccggctgagaagcgcagcccgggccagcaagaagcggagggggcagagccgcggggacacgccgcggtgtcctcccggcgtccggacgctggatcagcgccccgcaggatcacggttcgttttgtcccgcgagtctgcttagctctctaactctttcgacatcggggacccaggttcggggttggctggagtggtggaccgcgctggcagggatgctgcgcagctgcaggtgggtttggggtgtggttccctctgtgcctctaggtaccttcaggacgaggctttgggtttctcacctagagccgagagctttttttttttttttttttttttttttatgtttaagaatataatgcgttatcagaagtgcttcagaaatgtagactgactctgaagcttcctgaggcaacttctgttttgaatttttgttgtttttatttaatggaggtgttttattcagttcggtcgccactttctctaacacatcagaatggacacttctccacttgaacttgacagtatgactcaggagccaggaaatacaggaacactgataccgcgttgaaacagctcccacggaggatttggggtagtttgttttaggaaaccgatctgatggctttgcttagagaaccacaccacggaattctgttggcttctttggctccgcgaacatcagctgagacctgcgttttacttcctgtgactctcacacttattagagccatttctcagcagagggaggagctgttgtttctacacgggtatccacaaatgagtcacaagtctactacaattgcaaggctttgttaatacgcttttgaaaagtgaggttggattcctgtactttgaataagaccgaagattcagtctggtactgtcaaactggggcaggcggcctaggaagtaactattcaagttttcagtttcctagagcgcctgatgggacaacatgccagctagggtcactaggctgatctgagataaacccttaaaatcatgtgctttcccacagaagctgaagagaaaattaatttctttatccaataaccatttggctgttgttttcactagttggtagaaactggacatttaatgaagtgattgtaagttactctgaaatttaaaatatttcagaaagtttatttttaccaaattagtgccttaaaaaaaaacatatagaagcttttgaagaaagtagatggttgctggagccagacattaagatgctgagtctccctgaggctggataaaggctctaagaaatagacttccctatctaggagctcagtagagacaggaataactgcatatcctggctgagctgaggtcagccttagacagcagttgcaaggttctggtctgttccagccttttcatccaggtccatgcatgcaatatggacacaatgctatcctggcagccagggccacagctgagcagattctcctggacatccaacaccgtgagatggatgctatgggaaatttatacccaaagaaggtgccccagtgtgggggatcagagtatcctggatcactgctgggacagcaagggaaggtctgggttctcatcatctgcttgtcttggttggcagcctagttttcattcaatacatgcatgatttaaaaagcatattagcatatgtctatgatttaaaagcccattaggaaggcatggcttttaaagtgtttgaattaaccatgtttcacattacttagcagctgtgtaaaggcaaacccagtctctgttatcatccctgggcagttgggggcactcttttaaacaccagagtgacttaggagtgattagcagctgtctactcaccagttgatacaatagttgctccccatctgaggactggcttgactcccatgatttttgctacccaagctctgaaatagaaagttccagaatagtagtagtatattttgatttattttacttgagacatggtctcactgtgtagccctggctggcctggaattcaccacacagaccaggctggcccagaattcacaaattatctgtctgcctgcttctacctcctgagaactcatattaaaggtgggtgccaccacacttgtcagtaagatactctgagaggaaaaacatccacaccaaattaattataaccatattgctgcaattgttccacctctaattcttgttaatctcttgctgtgaataatttgtgaatttaaactttatcttaaatatgtgtgcacaggaagcagcataaacaggtgccaggcgttcactagagtctcctggaccggaagctccagggttaaggaggacctaatctcccagtcctctgaggtggcccactagcaaagggcatctgcccaacctaacagctttcatctctacgtttcatctctccctccgcggcctcagaggcacattttctagaggaaagaaaagataaaagtgtgttattcagcattgcatttctgggctttggcacaggttgactcatggttagcggaaaggagcgttgattaaacagtgaacctgactgtagatgagggttgtccaggagcttggaagggtgggtggcccagcagaaggagcagcgttctgtggtcaggaagctccagtctgtttcctgggcactgggggagtggggacgagcagaggggagggcagaaagatgaaggaggaaagataagaccgcctaggcccgtgtgccatggaagccccaggactttattctgaggaggcctcagagaaaacacacagcatgagaggaatgtttaaaacagagccgaagcaaaggaggcagtgctcacactataaagtgcttgccacacgagcagaaaggcttgcgtttgattccccagcatctgtgtagaaggtaggcccaacagctgtcacctgtaatgaaagcactggctaagtggaggccgaaggatcctgggacttgctgaccttctagtccacctggatcaatgagttcccgattctgtgagagggctcaggcaccagtgtcagccccataggcatgccagcacatgtgtacctgcacacacttgaagacatgcacacacactcatgaataaactcaagcgcccacacccttagaagattatggtactactgagaagagaacgtgaaagaggcttgaatctgtagggaaggagcttggaaacaaaaggaggagttgagagaactgacttagtataacatgcagaacccatcagattgaccagagggcatatccgtgggacattttatagattaatgattgatatgaaaggcccagtccactatgggcagtgccagccctgggtaggtggtctcgggttatattttaaaagcaacctgagcaagggatggagaacaagccagtaagtaatattccttcatcatctctgcttcagttcctgcttccaggttcctgcctcagtcttttgcccatccatctacaaccgtgtgtgtgtgtgtgtgtgtgtgtgtgtgtgtgtgtgtgtgtgtgtgtgagagagagaaagagagaaagagacagaaacaaagtaaggctgatgtattgaatgcttatgtggacaggacttattctaggctcagtaaatagattaagtccttcattcctcattggaatcctgtgattagctttccagctattttacagaaggttaatgattgaccacattggaaaatgatcccaagcacctggctccacagttggcattattgaacttttctacatgatgatacactttctgaaggaataaatgaatgaatagcatttaagactttgtactaaatgcaaattacaacccttttttaaaaaaaatcacaattcttttctgaacaggaatagttgcagtcataatatgaacacttcatgacctctattttactctgtagcatctttctcctgcttttcctccaagaattaggggatccatcttgtaatacagctgaagttaccataagttgctcatgttgtggtttgaatgagaatggcttccataggtttatatacttgaatacttggtccccagttgatgaaactgcttgggaaggatcagagggtgtggctttattagagggggagtgtcactgatgttgggtttgaggtttcaaaggcctatgccattcttaattaatgttctctctctgccctccctccctttctcatggttgtagaccaaatgtaagctctcagctactgccgcagcaccatggctgcctgcctgctgccatgttgcccactatgatgataatggactaaatatctttgtgaagattcaggacatctaaagatgctcagagcttttgacctacagagctttttctctctctctctttcttcctaccttccttccttccttccttccttccttccttccttccttccttccttccttccttccttccttccttccttccttcctttctttctttctttctttctttctttctttctttctttctttctttctttctttctttctttcttccttcctaaaatattatttatttaatgtatatgagtacactgttgctgtcttcagacacaccagaggaggacatcagatcccattacagatggctgtgagctaccatgtggttgctgggaattgaacttaggacctctggatgaaggctcaccactaaggctcaccactccactaaggctcaccactcagcggtcttcaccactgagccatctcttcagccccatggagctgtttcttaagtgctgaatgtccagcttcagtgtgcttgggctgtagaaagactggccaagggcccaggtactaaccaacaggttgtgggtaaatactgaaatgaagtcagggacatagaaactccaaatcttacattcctcgcttgtgatctgccttcggatgcctatttcatcttggtttgactctgaacggctactttccttcctctgacttccagaatcttgagcagtgaagccgactctgttgtatctgcttcctcttggcattagctggaccaatggttcagttattttctgctgagatcttgctttgtacttcgggcatttgagtagattccattggtcctaaaaagggtattctcacaaaaatactctgtcccccaccctctgccaagttcaacaccaactctacaccattctaattgtttggtaatttgatctgatctgacttgggttaacactctggtttttttcaacatggtcttgaccttcatgttggacccttcaaaacggttaacattgggttaataatgttctcaaatttaaccaagtgtaatgctctaaactgtttagatctataaaacttgatacctttccatgttttcttcctgtgtgaattaaatgtttccacccttcagattaatcaggaaagtgatagttgcctgttgcatgagggcagcaccgagccttctcaggcaatacaacccacactgtctcttggtgtctttgaattcctataactgcctgtggttcattaagtattcctctcaatagaaagtggaaggtttgggtttctacttcatgtgggttggtcttgcttccttaattctgctgagagttccacgagaatgggcaactgttatggttggctttggtaggctcgctcaaagccttctccccattctaggcattctgtgatttttgctgataacaaactctcagagtaagcatttgtggcccactctctgagcttataggtcttggacactgctgtatgtcactcaaagtctttacaagacttactaactggtaactttcagtgtgggttgtttgggggattggaggaagagatgaaaggaggttctgttctggtgtcttctcatctcagatggagagagagaggtcaaattcgttgagaagccgtgcttgaaggaaggtcagcttataggagtcaggaactcttctaggataggaagaagttccaggaagtgctattgcagagaaaatgttaaagtgctgttgttaatccttaatgaccgtctaaaagcatgtaagagatcgcttgggaaggaagattaaacattcataggtgcaggacacacatcgtttgactcacagaaatgggcaataatttttcttggaaggggaaagcacttgatagatattgattttgaatcagctctttgcaggaaacattagatatctgcagagaaacctggtaaaggaggcctttggtgttttgttcagtcctgaaggagtctggcaggtgtcattgctgtgccctccacgcatgcttcaggcctctgttcaggatagctctgactcgttttcccctagcaagatacctcttggaagccccttggagttacctcagaccttgtgctctctaaaatgatgtccctttctcagagtttcacagtcttctctgggcactacacacttctcatttattaccgacatgagggcaaagactgtctcttttacctgtgcccaaggtgtgtgactcacaaaagtgactgaaaagaaccattgtagtgggcacatcttctgaaactatttatcagggtttccatgttagatacttcagagcacattacaaacacagcagacatagatttaggcccagccccagacccatggaggttaccagcaggcagaacccaaacagcaagagacagtgttgaaaaccgttcaccaggggaacatgatgactattgggaaagaggaagccctgggcgtgtcagttcacagacccagtccgaggtcagagaaaatgtcacattttcaattaaaccaattcacaccaaaatcaaatctgggagggtggcttttgttacaaggggccccttttcaacaaaggaaaatcattcgctgtatgtagatcaaagttgagatccttcacataggtatgtgggcatacaaatgtatgtacatttgtacttgtgtgtatgtgcaagaattttctttcatgtatgtgtgtctatctgagtgtgtttgtgaatgtgtgtgtatgactatatgtatgtatgtgtggatatgtgtatgcatgtgcatgcatgtgcatttatgtatgtgtatgtatgtatatgagtgtgagtgtgtttgtataacaatgtgtgtatatatgtgtgtataaatatgtgcatacatgtgtgtttatgtatgtattatgtatgtgtgtatgtatgactatctctctgtgtgtatatatgtgtacgtgtatgtgagtgtatgtgtgtgtgcatacatatgtgtttatttatgtgtatgtgtatttatgtatatgcatgtatatgtatgcatgtgtatatttgtgtgtgagtgtatgtgtgtgcatgtgtgtgcacacatatgagcataggcatgttgggagggtgatgctgctaaagaaagaagacagtgacttcttcatttgtggagtgaaagcagtaggaagcaacagagaaggaagtttctgcacgttttatgcaaactgctgttgctagaagttggtcttaatatccagtgtgtaatatacagtggcaaaaaatcaaaaacaaacaaacaaaacttagagctctgaaatgcatccatctgtagactttctaaatttaattttaagtatataaaactggcaagatggcttagtgagtaagggcatgtgtcaccaggcctaatgccctgagtttccaacccagggcccacatagtgatgaaaactaatgtctacaatatgcatgcgcacacacaaagagtaaacaaatgtggggcttagagagacagcaccacagttagaggcacgagctgctcccacccaaatttgctttccagcacccacatggccactcacagcatgatcgtttgtaattccacttccagagaacctggccccctcttctgcattcctcagacggcaagcatgcatgctgcatacatacatacacacccgcaggcaaacactttgcacatagaatacaaattaataaatccttaagtaaataaatctaatagacatagcctttaaaatattgtttagagtcactattattaagtaagagattgttaggcttggcctaagagagtcacccttgaggttttgtcctaaatgtccccagggatgaagcacaggtgctgagagctgtatctattctgacttctcccctgtgaacttggcttccaaccaggggagagaggttgcaattcctgtgttgcaactggtagactccacccagtttagcagcttaagccgggtccttcctttttctttttttctggccagctcctcatcttttattattatcctgctggcttttgttttgttttgttttgttttgttttgttttgttttgtttttcactgattacaagcttatctgagcacagaaaaatgatgaattcttaatttttttttaactattgggatttaatattgccaatcgttttgtatcagttacgtgcctgtggctgtaacaaaacagcaagctcaaaggtaacttaaggaagagagaataggtttcggcttagagttcctgggggttatagcccatgatggtagggaggtatagtggatagaacgggaagctaagaattcacatcttgaatcttgatcacacagcagggagagtaaattagtagtaggtgggacttagtactctcaaagcccactcccagtgacatacttccccagtaaggatatactaccccagcctccccaatagagccaccagctaaggattgggtgattaaatgcctaagactatgaggaacatttctcacttaaaccaccacacactattagtattattttgaatgataaatcatatttgtgcatttgtgtggtaccctgtgacatttgatacatatgtgtaatgtgaatgattaagttgagttaacaatatgcccagcattttctttgcctacctttatgatgacttaaatttcaagtttaatctcttcttttttatttactctcttcatttatttcatgtgtgtgcattcacacacaaaactatgagtctgcagagaccacaagtagccatcacatcttttatttattctctaccacaattttgtggggcagtttcatacgtaaatataataaatttttcatttccaaaaatatttttaggtaataagatttgttccttaaggaatcaagttataagcatgtcaacttgtctttaaaggttaacagatgacactaggaatgtcctgtttagggctggagaagtggctcaacagttaagagcactgactgttcttaaagaggtcctgaattcaattcccagcaaccacatgattattcacaaccatctgtaatgagatctgacaccctcttctggtgtgtctgaagatagctacagcatacacgtatgcacaaaataaataaataaataaatcttaaaaaaaaaaaaaggggggaatgtcctgtttagtcaacgtcctttttggtattgaattgggcaatttcttgaactttgagtgctgtgaacgtctttgtctctggctcactgatgatttcatgtctatattccaccgctgatattctcaccataaacaccatgagtagcatccagatcttgtattcttattatttccctcattttgggctaagttgctaactagtgtctcgttatttgttttttgctgcgtgaagatctccagttttaaatcgtatgcctggttttcttttctgctgggatttcttcagaccattatccttattctaaaggacagataaagatttatgaatctcctaccagagtttctcttattgatttcacatctctaaatatataatttctctataatactagagagtttatggtaaagatcacagagaattcaggttttgccagccaaggatgagagcctgcctcatttaaattcctcttactatttttctgatgggtgtgtgttcacataccattgatcttcatgtaattgtatgtaatgatcctcaatgttttgctcatatccagttgtctgtatttttatattacaaagtattatactcttcattattgtcatatgatagtcatgtcagccagggattcctctgtttcttactaccatgttttcattttataaaaaaaattagccattcattagttgggaattatttattttagtgtttttcacatgtatgtgcacatgcacacactttctgtggggtcattcctcgggctctctcgcctctcctggattaggttaggtggtctggccagccagctcccaggtcttcctgtctcctcttcacctgggatgggataccagggctgggtttgtgccatcaggctggtttgttatgtgggctttgggaattgaagtcaaatcctgaagcttgtatgtaagcactctgctgactgactgagccatcacccagccccttggcaattattttaggctctttctctctccccaccccttccccatgtcaggatttcactgtggaggtaggacttgaattcactggtgcagagatcgcatgtgtgtacaccacagctggctcagggtcattttccttttcagatttttaaatttaaagccttgtaggaagtttgggtttatttcaatcaaacacttaaaatatgaagagtttcttcacacactagacagccactctgccattgaattatatatacccctcaggccttttcacattctactttggaatggggggtctcactaactggccaacctgggcttgagttcggtctttagttcaggcaagcattgaacttgggattctcttaccatagccactccttcttgtaattgtaatggatgagattataggcctgtcttttttacccagttctctctctctctctcccttcctttctttcttccttttctattttttaattttcatcaaacttatatattcgaggaaagccaattatttccatgaaacatataatcagagaaagcgagagagagagagagcgagagagagagagagagagggcaaaaacctcagtcttctttggcatttctattaaaggcaagcatgtccaaccccttgagatgtgtgccttcagtctctaaatagcatacttctgtcacaattttctgagctttctgttttaggcattaacgatgctttagatcatttgcaccctttctagccagccatgcacccccattcccaatacaactgtatccgaacttaagctaaatcgatattcagaagcagaaccatgtgttactacatgaatatgttctggaactcgccacgcgtcctgcttccccggtagtcagttagctgctattacttggcacatgcattcatatacaaatatgcacagagatgtgtaacacccccattacaataaataataaaagattagaaatgagagctaagccaaagactaagtcatgaggttaggaggcctcagattatacctcctggtcctttcctggtttccgaaatgtgtgcaagcagagtaactattcaccatgagaacataaaagcacctgagaacattctcttcctttctagaattttcttttcttttccaggtttcccctcatcattttatttagctgcacctatgcaacactttggatggtggaatgtgccccatggctttctctgtgatgctggaggaggtgcctctccagaagcagcctcatagaactctctgtttcaccagagaaaggctctccacttcatatcaccagggtcaatgcttctaaatatgcttgctgagtgttcctgacttgctaggacaaacggtatctggaaggggatgttttagattttttttttttttgtcatgggctattttatagtcatgacacttattttaataaatgattaatttatttagataatggaaaatgtttatattttatatcaaataattctaagtttttatattcttacaaagagttaaacaggaaaaaaagagattttagactattaacaaagaaagaagggaaagaaagacaggaagaaagagtgagaaagaagaaagaaagaaagaaagaaagaaagaaagaaagaaagaaagaaagaaagaaagagagagaaagagagagagaaagagagagacgaagattatttaaaacctcaaataggactggcaggatagctcagttcgtaaagtacttgctatgaaagtctcgtgacctgagttcaatccctggaacactcaaaagtggaaggaaagactgaccccaccagattgtcctctgacctccagctatgcgccacagcacacatgaccctgcttccattaaaaatgtttaaacttgaataatataatgacccataacagatgttaaggttgcttacggcctcagatgaagtaaaccagaggctgttaatagtaccctggcaaatgtgctgttaatatacatggttaccgggtctgcattagttatttgagccaattaaggtcctacgaatctcgggaactgatataagcgggtggcaacgacaaagtatttatttatttatttatttatttatttggtctacaaagtgagttccaggacagccagagctacacagagaaaaccaaaactacccacttccaccaaaactggctcttcaagttctcctgacctcttatcagaccgaaccctggccagagttacagttagcaggtgtctatctgtgtgctgtccccagctcacagttcctggcccgtgtgcctccctccctgggaccaggaagcagttctccagctcctgaagagcatgcagcaatgtaaagcagctgcctctcaccatgaagcagctctttaaggctcactgtctcctcgctgtgaaaaacttcagttttcaacaggaaagagagctgtcctctgattcattaagatatgtatccttttttgaaaaactaaatgtatttttacatgaaagtttagataaattgtgaatagaatatcacaaatataatgtgtagtcaaaatatgtacctttatttcatgtgcgtgcattcacacacaaaactatgagtctgcagagaccacaagtagccatcacatcttttatttattctctaccacaattttcaatgtgggaagtttcatacataaatatagtaaattttttatttccaaaaaaaaaatttagatttgttccttaaggaatcaaattataagcatgtcaacttgtctttaaaggttaacagatgacactaggaatgccctgtttagagctggagaggtggctcagtggttaagagcactgactgttcttaaagaggtcctgagttcaattcccagcaacaacatggtgactcacaaccatctctaatgggatctgacgccctcttctggtgtgtctgaagatagctacagcgtactcgtatgcacaaaataaataaataaaccttaaaaaaaaaggaatgtcccttttagtattataatgatcatttggagtattgcttatattttcatttcaagttttaacaaattttttaaaactcatgagtattagctttccaaaaaattatgacttttctgtgattcctgtcagcttcccaatttgggattaaagaagaatatattggggggcgcagaacaacccaaagagaagtgtatcagtgagtattggggacaataaaacacccccagatagctgttggtcatctcttatgtttgagacagtaacatgagttggtctacataagttttccagagtaagccatctctggttagatctcccctgtcctctcctggctcggtcattcagccactctctttgtgtggtcctcactctccagaaggctagctccagcttcctcacaaatgtccccaatagtaagatggggcaagcctcagtgcccacacacacacacacacacacacacacacacacacacacacaacttgctgagtccatttttgttgtttgtgtatacagtttcagggctgaccacttcttcctctcccacaatccttagttacccatagttctttgctggggatggcaccccatgaaactttcccctttccatgttagcatgtctgttgatttttaccattgttctggtcttgtttatgcggccatacccaggagagactttcacagcaaacacttttattatttcttgtagctctaactttaataattatactccatctcaatgaatggtctttaaaccctcatcttgtgcattgaatgaaccataagagaatgttaaatatatgtttgacaaatgcacttttaacaattgttttttattttctttcttttaattaccttgaaaagcagcgagaaaatatttcaagcttataatgtttaaaagataaaagaacactttcttgatgggcaggggtggtgcagacctttaatcctagcactcaggaggcagaggcaggtagatctcagagttcgaggccagcctggtctacagagtgagttccagagcagacagagctacacagagagactctgtccctgggggtgggagggcatagggctttctcgctttttgatatgtcactttttgatgtgtcactttttaaaaccgagaagcagagcagagcaccgaggattacaccaatgagtgagatgattcctcatgggcttgagtcagccttttggggagagagcttttgttgtcttttcagggtgtgtgcttatgggctagcttctgtgacacagtggaatgtcctgttcccagccagatgactgtggcgggggtggctgggcaggaggggctgcacgtggttgagctaggtctgtacagggtgatcacagctgagcaggtgtgacctcgggtgtgtgctgtgtgggcagggctgcatgctcagcttaccaggcagggtagcctgcgtggcttcatccacccgagaaggggtgcgatgggagcttctcccagggtctcctgtgggctaggaaaggaccttttcctctggagctgtcatttctttctagtgtttaaattttgctataaagctgaggcccaacagctatatattccaaaacctgaaataagagcttcgtcattatacaaaagtgatcatttatactctctcggtgacaagatgcttgcttcctgcttcagcaatagctggatgctacatataatccaagctcctgtgtctaaacgtgtagttaacgttcatactgaaagaaaatcaccaaactcgtgagaccagaataaagtgtggactgctcccctcttctccagttcacttctgtagcaaacccctcatggttcagcctggccctccctctactctgctttctgcatctccgtgtctgatttttctcactacaagtcaaggtccaggagacaggctgtgaaaccaggaaggatttgatttattggtgtcagacaacttgtccttgatgtatacgttggttttttgaggaatgtcatggcaaagtatgatggtatgaatggcttttaggcctgtccactttgccgaccacattcagccaaagacagctattaatggaggtcaaggagaaaactataagtgtacttaaaatattatgagttacttttgttgttgttgttggtggcggtggtggttttgttattgttattttgtttctttgtttgtttttgttttataacccaatcagtatgtgactctctggtgtgaactttgtagatggtaatatcatatcacagtgggaaaagtctggatgccctggcactggaaacttacacctcacagctcatggacactgtaagtccaatctaagggttttggcaggtttggtgatttgactgggatgttccccaaagtcttgggtatttgaatattcggtccccggttagtggcgctgtttgagaggtataagaagtgtgtccttgctggaggaagactgtcggtagagatgggctttgagagtttaaagacttgtaccattttgagtctgctttctcagctttgtactcactgttcaagatgtgagcccttggcttcctgctcctgccttcctgcctgctccttccccaccttggtcagctctcatccctaggtaaccgtacagctgtataatctgttccttctatgagcctgcttggtcagggcgtttcatcacagcagtagaaaaatggcgaatttagcaaggtttgtttcttctgaggtctgtttctttgccttacagattaacgctgtcttttcttagtctccctgtgtgtgtacagaacttctcccgtttgactccttctcagccacattgaattaggatccattcccaaagacttcattttaactttaacttaactactccatcaccagctccaaatacagatacattctgacacgctacagtcagaactttcacacatgaagaagatagttactgtcaaccccactggttaagccaattcaatgttctaagtcctttttattgagggccagaccaagagtgtgcttgtgactctgaaaagtctcttggtgcccaaacccaggcatacagagttttgaggccaaaaccacaaaggccacaatttatcttgaagttacatgaaggtcagagtagccttgaaacattcatttctagcagagcatggtaattattttagacaagacgagccaattatttttcacttatctcttttctagctattttagtttcttttctagtttattttaatttattttaattatttcggttaataattctggagcacatcgaggctgtgaaaatatcaaatgtggtgctgagatggacgggaccgctgtggagagaggtggagggctgagagttgtctgagccagtggcttgcaaccctttcacacggatggcctgagaccatctgtatatcaggtatttgtgttatgattcacaacaatagcaaaattacagttattaagcaataaaagtaattttatggtcgggggtcaccacaacccgaggcactgttttaaagggctgcagtttcaggaaggtggaggactactctacacaaacacaacgtgaagccaggacaagatggcgttacctttgtcatttcaaagggacctaatttagactgtaacaattaacaactttctttttttgttgctatagggtgaatgtacataaagcctttcctttataagcagttattgctacacattgtgtatatggaatgtttccttagggacaagcagagacagtgacatgtggccgttctctgtaacatctggtatgttagttttgtagttaccatccccattcattgatcctcagtcatgcttcctgatatgagagaaaatgtgtgtgtgcaagcatgtgtatggtgcactgtgtgatgtatgctcacgtgttttgtgtgtgtgtgtgtgtgtgtgtgtgcgtgtgagcgtgcctgtgcgtgtagatgttggtacacgtgtatatgtgcaaatgtatagggtagaagttaacattagatatcttcccaattttctctctgccttagtttttgagtgaatttctcactgaatttggtgctaaataaattatttggctggtcagagagctgcagggattcacctgtctctgctaccccagagctgtaactacagacttgcatcacggcacccagatatttacatgggtgctggggaatttcagctcaggtcctcatgcgtgggtggcaaacactttaccagctgagccatgtctagaaaataacaagattttatgggccaaatccaacggtaggatccaggtcccaacgtctcacgtacttagctaacagagtcacgtcatccttcattttgaatcccgttagataacttattaatgaacttcaaggtaccatgtgattatgaggctcagtgtccatttgaatgcccttttgttagtgtctgccttaactgttcgcctgagagtgaagtgactctaataagcccctaccatccttgcttatgctacctctagggctttctggatcgtttccatgacgtactagactggaggtgagttctcaactgatcttcattttcatacgcagcctctctccatcctcagaagtcaccatcttgctggtagaggaagaggccgagagttttcctttccttccctgtggtttcttggccctgtcctctcttcagcctggggagccattaaggttctctagaactgtgagactttcatgaccacaaagctcccatgagaggagtctgtgggatgagctacagatttgattatacactagaatcactggaactcagtgcagacagctgcaggtgactttgttgtctccttatggctgaaatccacataggtgccaccatctcctttcttctctatgcgttcttacatgaaattctttttattccccacatttttattagatattttcttcatttacgtttcaaatgctatcccaaaagtcctctatacccccccccccccgccctgcttccctacccactcactcccacttcttggccctggcattcccctgtactggggcatagaaagtttgcaagaccaaggggcctctcttcccaatgatggccgactaggctatcttctgctacatatgcagctagagacacgagctctggggggtactggttagttcatattgttgttccacctatagggttgcagaccccttcagctcttgggtactttctctagctcctatattgggggccctgtgttccatcctatagatgactgtgagcatccacttctgtatttgccaagcactggcaaagcctcacaggagacaactatatcagggtccctttagcaacatcttgctggcatatgcaatagtgtctgcatttggtggctgattacaggatggacccccgggtggggcagtctctggatggtccatcctttcatcttagctccaaattttgtctctgcaactccttccatggatattttattccctattctagggaggaatcaagtatccatgcgttggtattccttcttgattttcttgtgttttggaagttgtatcttgggtattctaggtttctgggctaatatccacttatcagtgagtgcatatctaatgacttcttttgtgattgggttacctcactcaggatgatatcctccatatagatccatttgcccaagaatttcataaattcattgtttttaatagctgagtagtactccattgtgtaaatgtaccacattttctgtatccactcctctgttgaggggcatctgggttctttccagcttctgcgtattataaataaggctgctatgaacatagtggagcatgtgtccttcttaccggttcacatggaattctattgctcaacaacagaagggttaagcaatccccttccttcccctccttctttccaatccttccatctcatattgagttctcagcacacatcacatgtgtgcataaaaggaaagttagaagcagacttctgagagttataaaccgtctctggaatttcctacctgatgtcaagtgaattaaaatagacgttaactcagcgactatgagcagtttgccgatgctctcatactactctttgctacccagaagctcagatcggttgagttgtatgatttgttttctattagttcctatagttttctcttttaggatttcatggcacatatcaacctattgagtatagagtttattctgttgctcttccgtgccctcctctgcattttgatgtgtcctcagcaaagatgtatcgttctaacattttgggaggcatcatcagaatggaagcaccttgggtgacacacaccctcttattgtagtttttctgctgctaacgggtgggagaacgttaatgggtggaacttacccacccaggcctgtgctgtcagtaaggtactgggaaagttcccttgaaacacctgcccgaaggtctgaacatttcctctgcccttctcatctctgtacagaggagagacttgtgccttcaaatgatcttaggtctttactgatggaggaggacctatggtgtcagggtgttagatcccagaaacaaatgactccttaaatgttttctggtagctcctcctaggtgctttggacgctgctttgctcttcgcgcggagaatgaggtgtcttcacacacagctcctttacagctctggggaagcagtagagagcgtagaaccggtctacaggcagagtcctagaagcctggtacgtcaatcctttccatttgccaattaccttccaatcaaagtgctttgcaaggctttgagcaagatgcaaggaaaacatctacctttcattcttgctgtgttcatcaaaatgcatccatttcattaatctgggagaacagaatccactgaacactaacttaagcagatgaaggtggcagccacccaagtgtacttccttggcaaacagaatgtcatcctcgtagtcatacatagatgataacattaattacaaaatctgtacagatctcacagaattatggaaacacatagcaaaagcaagtattagcaacggttgcctgttatccaataactctaggaaaatcgttattcaacattttgatgcatcttgctcacatctgattcagacaatcatgtggggctgctgcaattctttctctgtagctctctttcctacctgagagagcatgcgggatcttcatgtcattagatggccttctagacgctgtgaccgttgtagctttttgtgcattgacgtcattcctggatctctgccgctgtactagaactcccagggtccagttgctcatcctgcttcagtgtccccagcagctcaaaccacagctacgcacctttgcaactgacttcagtgtccaagttttggtttgtaacaccgtactacagttacctttattttgttgttattttgcttcaaaacatttgttcgtgtgcctgtgtgttcctgtgcctgtgtgcctgtgtgggagtatatgagtatatatgagtatatgtatatgtacacacacacacacacacacacatatatatatatatatatatatgagtgtatacatgtcttcctcagtcactctccacctttttttttgagacagagtctattgctgaagctagagctccctggttttgtgagactggctgacctcctgtctgtgtaaccccagggctgggatcacctgtgtaccctgccacatctggcttataataacaggtgcttagggatcagggttctgcgagccatctcctcagcagccttacagcatttgctttattcctttgttcgtttatttgcttatttactttgacacagcatccctggctagtatggaacttactatgtaaaccaggcttgcctcaagtttacaaaaatctgccagtctttgcctttggaccaaaggcacataccaccatgctcagctcttgataaagggtttttttcctttcatcttttgttagtttcgtgtgtgtgtctgtctgtctgtctgtctgtctgtctttgggtatgtgcacgtgagtgcaggtgaccatgatgcccaaaagaaggtattggatcacctggagtcacgggcagttgtgagtgctcgctgaagctaacactccctgatttggttagactggctggttagtgcggcacacatgagtgctcagaactaaacagagatcctcagcaagagcagaacctcatcttaagtgccctagccctagccccaggcctgtaagaactcattgtgtagaccaggctagcctccaacttactgatatccacctgcctgtgcctctgtagtactgagattaaaggtttggccaccacataggctaaaagttgtactaagtacaagagaatatatttactagtgacaattggccacaaaatacagagcatttaatgtctttttcaaagtcttgtaagctgcctttattgaaaagtttacaaacctttttgagtttttttccttgtgtctgtgtgcctaatttcatggtggagaaacaaaaagcaaacaaaagaaattgtttcccaaagcaatctaaaagtttaaattgctgattgaattgggggtgcccgtgatattgaactgcagacgtgtagaggctgtgaaacataactaagggtctgagtcacggtatttctttacttctaaataaaatgtcacagggcattttgccgctttaatgcccacacggaaaaggaattaagagcaagctccttacattgagcttcaacccctctgaatgcacagatctgaccatcattaaaggatcctaactgctgtttcttttgtaggcaaaatgaaggatcggcttgcagagcttcaagaattgtccaggagctatgaccagcaattcccagatggggacaatgactttgacgctcctcgggaggacatcgtgttcgagaccgaccacatcctggagtccttgtatagggtcatccaggacatccaggatgaaaaccagctgcttctgatagacgtgaggcgcctggggaggcagaacgtccgcttcctcacgtccatgcggcgcctcagcagcattaagcgcgacaccaactccatcgccaaggccatcaagacccgaggcgaaggcatccaccagaagctgcgctccatgaaggagctgagcgagcaggccgaggcccggcacggcgcgcactcggcggtggctcgcatctcacacgcgcagtacagcgcgctggcccgcgctttccagcaagccatgtacgagtacaaccaggccgagatgaaacagcgcgacaactgcaagatccgcatccagcggcagctggagatcatgggcaaggacatgtcgggcgagcagattgaggacatgttcgagcagggcaagtgggatgtattctccgagaacctgctggccgacttgaagggcgcgcgggctgcgctcaacgagatcgagagccgccaccgcgagctcctgcgcctggagggtcgcattcgcgatgtgcacgagctcttcctacagatggccgtgctagtggagaagcaggaggacacgctgaacgtcatcgagcttaacgtgcagaagaccctcgattacacgggcgaggccaaggcgcaggtgcgcaaggcggtgcagtacaagaagaagaacccctgcaggaccatctgctgcttctgttgtccctgtgtcaactagcagctggcttgagtctccactgcacgtgccatgtgggaaacatgtccaggatgcccagccaaaggcatcttgcactgggccgagggagagggtcccaataccttgcagaattcagagcatagagaaagtgggggttgggatgcaagatttggagtccggcacctgctgccttcaaggaatagttgttaatatccaatggctacttaatgtagacagatttccactggcgttgtgtgatgtcattataaaatacatagcactcagcatcacggggaggaactaaggtcatttgctaagatgtgtgtcttgaaaggaggaagccaagagaacaggatgctaatagtatgagtacattatcaaaagttgcctttgtttatcctctctggaaagttccttggtgctatatggttttgaatgacattcacttcagtattcattacgtctgttcattttcgtggaactttgaccttgggtaaattggctgccattcacttctgattatttatgttgtgtgagccctgcgtgaactccttcccttggctcgctcccactacacagtaaccctcactggacactggctccttacctctctcaccttttatatcgtccaccagcttatatatgaatatttttaaagcaccaaatattgaacaagcactcaagttgagctttatattggtcacattttatggatttttcacagataacatttatttaaaatttatctttgtacttcatttcatatgaatatgggtgtaattgtaaactaatctccattcctatgtgtacattaatggccaattagattgactttgcttttggaaattctgtatataaacaacaagagcagtttttgctgtgtgccattgtttgatgatcctgagtgtatttcatgcctgtctgcacagtccagtttgggtctaactttattttgaacaactgtgtgctgtcattaataaagagaagcgaggaagattggaaacttgtgaagcagctagagatgctaaagtgaggttcttggggatagtaatctaccttactccgagccattcctttctccattaaagcagagagacttcaagtaaaatcttgtttttcaaataagtttaataaatatgaagttataactgtctctctttttatatttctctcttgacccactgaacctaaattgattgtcttttccgattattgttaaactatctcccacctaactataatgtctgcatggaactctaaacaaagtttttacagtcatttagaaattgctgaggttttaaagatttgctttcacttgaagatgttggaaaccatgttccagactgtagttaccacgcctgtgtgtgccttctgaatccactctcagctgctggtttttaacacgccagtgatttcagtggaaagtcctatagcctgagtttataagaagacaaaagaagagcaggaactctctggggcccgttgatctgcttatgagagagaagacccagccttcgcagtttttctttgtgcagtccgatatgaactgtacatgtggagccctgccaggctctccttacactttgcccagctcctttattaccgaactactgggatgttcccctctctctaagggagaggttcccacacggccccagtgacctaatttttattgtagagcagagtctgtctatggagactagctattttctgcaagaaggaacagtctgtaaatttaacatacatgaactctggaaggactttctttcttccttccttccttccttccttccttccttccttccttcctttctttctttctttctctctttctctctttctttctttctttctttctctctttctttctctctttttttagaaccaatatgaaaataaataactttctgtgtctgcgtaattttcttttgagacacagtctcactatatagccccagatgacttggtactcactatatagaccaggctggtctcaaactcacaggcatatcctcctgtctccgcctcctgagagctgatattaaagtcatgtgccccaacaccagggtagaacacttttgtcctaagtaatcctggtgatgagtctgtgctaactattctatcctgcttgcttctattagactgttgctccagcctgtcctgtcctgtcctgtcctgtcctgtcctgtcctgcccaagacatgaatcataagctccatgaagagttctggaaagtcatccaggcctgcaacacagacctcgggggaaggcatcagttgcctggaacctaggatagaaaaaagaactgactcctgcaaattgtacacacacacacatataacacacacacacacacacatcacacacacacagggagggtgatttaaatatagactctgaatatgagaaaaagcatgtgttgtttgtcttgctgactctggcttatttggattttgtttgttgtttgtttttcacagagtctcattatgtggccctgaatgtcctcaaactcactatgtagaccaggctggccttaaattcacaaagatttgcctgtttctgctttctgagttctggcctgagtctagtttatttcatttagcataccaatttcttctgtcatccattttcctaaaaaaaattgaaacaaaatttaaaaaattaaaaaagtcatgattttctttttcttcatgactgaataaaatcccactgtgtgtagtgccacattttctttatgtttgtctattggtggacatctaggctggatatttttctggctattgtgaacggtaaagcaacaaacacagacattcaagtatcgctgttcacttagagtgtgtgccccgcggtggtttaggtgggggcaatggttgatcttggctgttgacctcactggatccagaactaataaaaataagacaagctgctgccacttctgtgagttatttcttgaccaggtttgtgaaagtaggatgacaactgtaaatgtgggcagcatcttctgatgaagcccgagcaagagaagatgtaagaaggagacttttgcctgcttgccttcactcttgcatgcaagtccgtccactctgttgctgctgctgtggttacattccttggctggtatcataacccagttccttcaggctgcctatgtagatttccagtggctcttcctcttcaggagtactctaggccttcagcaccagactggagctattgagacactcagacttatgatcagctactggattctcagcctctctggtgtgaagcagccatggttggattactcagaccatatcctgtaatccaagctaagaaatcctctattctatcagtacgctggatcnnnnnnnnnnnnnnnnnnnnnnnnnnnnnnnnnnnnnnnnnnnnnnnnnnnnnnnnnnnnnnnnnnnnnnnnnnnnnnnnnnnnnnnnnnnnnnnnnnnnnnnnnnnnnnnnnnnnnnnnnnnnnnnnnnnnnnnnnnnnnnnnnnnnnnnnnnnnnnnnnnnnnnnnnnnnnnnnnnnnnnnnnnnnnnnnnnnnnnnnnnnnnnnnnnnnnnnnnnnnnnnnnnnnnnnnnnnnnnnnnnnnnnnnnnnnnnnnnnnnnnnnnnnnnnnnnnnnnnnnnnnnnnnnnnnnnnnnnnnnnnnnnnnnnnnnnnnnnnnnnnnnnnnnnnnnnnnnnnnnnnnnnnnnnnnnnnnnnnnnnnnnnnnnnnnnnnnnnnnnnnnnnnnnnnnnnnnnnnnnnnnnnnnnnnnnnnnnnnnnnnnnnnnnnnnnnnnnnnnnnnnnnnnnnnnnnnnnnnnnnnnnnnnnnnnnnnnnnnnnnnnnnnnnnnnnnnnnnnnnnnnnnnnnnnnnnnnnnnnnnnnnnnnnnnnnnnnnnnnnnnnnnnnnnnnnnnnnnnnnnnnnnnnnnnnnnnnnnnnnnnnnnnnnnnnnnnnnnnnnnnnnnnnnnnnnnnnnnnnnnnnnnnnnnnnnnnnnnnnnnnnnnnnnnnnnnnnnnnnnnnnnnnnnnnnnnnnnnnnnnnnnnnnnnnnnnnnnnnnnnnnnnnnnnnnnnnnnnnnnnnnnnnnnnnnnnnnnnnnnnnnnnnnnnnnnnnnnnnnnnnnnnnnnnnnnnnnnnnnnnnnnnnnnnnnnnnnnnnnnnnnnnnnnnnnnnnnnnnnnnnnnnnnnnnnnnnnnnnnnnnnnnnnnnnnnnnnnnnnnnnnnnnnnnnnnnnnnnnnnnnnnnnnnnnnnnnnnnnnnnnnnnnnnnnnnnnnnnnnnnnnnnnnnnnnnnnnnnnnnnnnnnnnnnnnnnnnnngaaagaaaggaaggaaggaaggaagaaagaaagaaagaaaggaaggaagaaagaaagaaagaaaggaaggaaggaaggaaggaaggacagaaagaacaaaagagatagaaagaaaaaggaatgaagaaagaaagaaagaaagaaagagagagaaaaagagaaagaaagagaagagagaaaagaaagagaaggaaagaagagagagagagctgaagaaaagaaaaagagaacccccttcctcaggatgtgaggaatcagaggggtcagggtcacaccatgaacacatggcccacagaaccaagtgactggaactcatggggtcctgcagagatgggggagcctgtacgggtccaacctgggtcctctgactatgtcatgactgagtagcttggtggtcttatgggaatcctaacaataggaacagggactgtccccgactcctttgcctgcttgtgggacccttttcttctgactgggttgcctcctccagccttgatgtgatgatgcgtgcctggtctcactgtggccatgtggtgattcgtgcctggtctcattgtggcttgttacgccatgtttggtttacgcctctgctcttttctgacgggaagcagagtgggcaagtggatctgaggggaaggagaagcgggagagagatacttggggtaggagagataggggaaactgtggtcaggatataatatatgagagaagaatagaaaaaattattttgaaaaaaaggccctttctctagacaacattagctgtcactcctaagagagagggttttgttttacaacactcctctccaacgtctggctcttagaaccttcccatctccacttcccagatgttccctgagctttgggaagaggtgggtgtattggtttgaatgagaagtcgccccttgttagtcttaggcatttgaacacttgctctccagccggtggcaccatttgcacagatttgggtggggcagtcttgctagatgaggtatatcactagggttgggccttcagtcttgtaggtacttccaatctattcccttcagcgtgtttgtggttgaggatgtgggttctcggcttcctactctagatcccagatctactgcttgtgccacgccttccccaacatgataaattcttatccctctggaatgataagccaagacaaactcttccttccataagtagcttttggttgtggttttatgacaaccatagaaaaacctgtaatacagtgggaagtgatagagatgtcttgtttggggtcggccaatatggtctctcgggggaaggggcagagatgaagaacagggggttaggaagccctgtgaatgcatactgtgaatgatcacatcaagaccagctatcaggatgcagatcgactttatttagagtgattcaagatttgtaaagttttggcggactgagggtaggaacatccaggatgggcaaaggtcacctaagggcttagagcacttaaatgcctcattagcacggggagcatttcaggaatctcaagtactagctgaacaggttcttatcaggagaaaggaaattgatcctgtcatctaagtaaggctaggtggtattcctcaggtagaggcatgtatgtgggcttagaattccccagacaaaatcagagaaggagaagccccactaaggaagggagtctcccatgactgcagaggctatccagtcaatggctggcttcaaccttaattaacagagttttcccacactgcactttgacaaatgatatgtttctgtattaacctctgtgagataaagaactctgatgaaggatgagagcaacactaatctatgcatataaagttaaatatttttagaacagtttgatactgtgtccatagtaaaaacaatagttgtaggttatgccctgtgtgcaggcgctgtgacctcttggctacaggttcttggctaagtttatagttccaggtgtgagtccttttctgcatagaggtcctgaaatctaatcataaagtagttggttataccacaatgtctatgccactactaagccagcagttggttctttagttcacaggggacacagcggggacagtcatcacatactgttgatgactgtctcccctagaagaccgcatagcctgtccaatactatgaaagccagccagcaggtaggagtccattagctgagttccagcttggtgaccaaagtgtgtagtatcttcagcaataagggtcttttcatcaagttctattgggcaaccaagagcgatatcaatagtctgtattgtttggggaaatctttgggacctccctctacaacaattcacagagaagtatctccacctggcacaggaaatcttgtttcataacctgtggcttctgaaagtattaacctcctcccatgtagggtacctcaactaaaatcatttttcctttttaaaataatgtatgcatttgcatattttttcctatatatgtctgtgtactatgtgtacccatagaggctggaagaagatgtcagagctcctggaagtaaagttacagtggttgggagaggccatgtaggtactgggaattgaacccaggtcctctgaaagagcatccagtgctcttacccattgagccacatcctccttcacttttccctttaaattatatatttttactactcttataaagtagtaagtttccatataacatttcctacatctttttgttaggtattcctcccccagtcctctgcaaacacacctggtctgggccactgtgcagtgttctaattttatgtggttctactcgttcttctgagccgcggtcagccaaatcattggtgaccttttactatgtgtggttttttaattcatttaagctttccaaatactttttaaaacctcagtctccttgctcttctgtgtgacctaatttttttcagagctataacaacatacctgaaactctgtaacacaaaaaggaataagatttgttcagctcatagatatggaagctggagtacaacattgagcagcctcaaatctgatcttttggtgaaagccttgtgctgttccatgcatagtagaacatggaaaggaagggacaaaggagataatagtctttacaaaaaacaaaacaaaactattttctgggttatcaataaccaattcagtttcaaaaaaaaaagaaggtgaactcacctcttcatgaaaaacatgggtctgatcatggtagttctacccttgtgactcaaacatgtcctgatactgactgcttcatggataccaagcccgaacatgaattttggtggcgtctgataaactgaggtcttagtatgaatgacctgtggaacaggcgacctgaagcggcagagcagagaaagtgaaggttgagggtgccaaccccagaagtcatggattattgactatcaatctcactgtcaggtgtgggatatctcacgaggagctgtggtctagaaaatgcaggccattgccatccttcctggttgcccaccagaactgtacagtaagaaactatcgttgaactcggttgcagagcacagagaatccacactgaggttgagcgtcctctctgctgtctaggtttcgccgtgccaaagtttctatgcaggcagctgggggagaaaaatcagcggtggtctttcccatctttgcaccttacaacgccacttgccaggcaggatgcccccagtgctatcacagtggcacagctgtttcaggggcatccagctgatttctgactgattcggaggtccactccacagagggagctcctgcctgacactgtgaatttggtcaaaggctcatgatggggaggaaggtcatggtcactagaagtgaaactgtcacttttgttttactgaagtgaagctacttcctacatacttgtgtttataaccgtgggctagtgctggcctcagcctcgaccaaagacgcttttatttgcagtgagtagcggtcaatgccgaatcaggtttggccaaggttctgagaactagtgactgactgttgagtgctcaagtcttaaatgggacatctgtaccatccatccccctgcaaagttcagggaatgtcacagaagaagggggggggggataattaagaaccagacggtcggaggagggctatgaaatgccagggcactcatgaacttgaagctgccagcccgagattgcctgcatagagcttgctgaggtctgagctcttcaacatccagtcactggtgggggaagggttccaagggcttagtcctgtccgggagtcatagaagcagttaagctttctggagaggtcgtccctgaattcagtgatgcagccacaggggagatactgatgctccagtgactagctccatggctaggtgtgtgaccagttaaacccagggtgtgatggaaaaacaaaagtaaacaaagaagacttgaaagtgggatggagacttggggtgtggatgaaaagtgtgggcatagatgtgagggtaatgtgtgtatgtgtgtgtgtgagagagagagagagagagggagagagagagagagagttgtcaaagaataaattaacttaaaaagaagagacaatgaaagtgaaaatctaaggcctgctcagtggccagcacacctggcagagcgcccaggaaggccctgctgtgagacagagcttgggagagatactttagtaaaagttaaactcaggtgacatgcatagagagaacgcggcagaactgcttcatccagaagtgaatcagttgaaattctcttttattccaaccatatgaagagcttttcaaaaaatttggtggggtcgggtggggcaagagtacagactggtaacagtgcgtgcttcgaattctcaaggccttagattctatctacaaaccgcacacacacatacacacacacaatgtaaattttcttcgtttacaattcacactgtctgtgaattaaatagcttccattcctcatctgcatggtaagtggagttgcaggggtaaactaggaatgcatctggagtttgaggcacagacagatatttcatcttggtgacaggtgtctctcaagcagctgccagaaaatcaccagaagggggagggcaacacagggaatgtcacacacacacacacacacacacacacacacacacacacagaggaaaaggagttatttagcctccaccgtgacaaacccaggaatttttcttgctctctcttgcacataggaatgtttgactagttcattctttgccttgccctgtggtttgccccgtgcaatgcagcctcaaatgggcatagtgtcatggtttcttcataatcttcagctacactttgcaatctgttgatggggggaaaaaaagaagcctgccgaacaagaaatgtcacttcatggtaaggtattaggacacagacttaggagaaggaatttaaatctatcactagagaaattaaaaacaaaaacaaacaaacaaacaagaaaaaccttttctataaaccccatcaacagattccctgcatcaaccattattattaatgtttgaagtaattatgcaacaagttctcacttccgatgggaaatgacagtctccgcactcacggtgcctctctctctccgcactcacagtgcctctctctctccgtgaggcatggactgggaacaggaaatgcaggacttgcaacctgcaaagaaccttcgtggataggagacaaaacaacttggaattgattcctttgagacaatccagtggtatcaatgaattagtgtctaaaataaaaggatgagtgtcattgccaagacctagaaaccgaacacttgagagacaggaggattactgtgagtttaaagccaacctgggatttaaagatggcagaaaacatttttttttaaacagctggtagctcaggggcaggagcttggctatcatgcatggagtcctggattcaatttctggtagaggtggggcgagagggagggagggagggagggagagaggaagggagggcgagcctgagcactagatcctcccaggtttgccccagaaggtgaaataaagcctaaaagagggaagctgaaagtaaaacagagacatcccccggggggggggggcacattcaaatattgtttttacaaaaaaagcaattaaagcaatagaagtgtaaaggccctcccagcgttgtaaaccactacagtatcaaagcctttctgcccatcacctcctcactgaatggttctctgagggatgaaacaagcaaagaacaatggtgctgttaattctatgtagtctattgtttccttatttacccttctttcttttggaagaagagaaaatgttaaagacatgaattgttctcaaagcttgaagccacaaagcccaagtacagagtaaatactgcggtttacacctcaaaggaaaaggtgtggatcccaggtctgccccccccccccccacgcagtgccagggtaaactgaactccttcaggtctgcaacagtaaatattcatgcattcgaagctatattagcaattcttgatatatgtgcctcaaagtgtgaagggtgtagggcttgcctgacaggatttgtcatggactaaaccacacacacacacacacacacactcccttttgcaataaatcatcagatagattaaggcaactgaggaaaagaggaaggggtgttttttgctcccccacccccagtttttggtaaaacccttatatcacagatctttgacaataatggaatgagtttgcctccttgtggacacggtagccctggatgcggtctctgttctttcctctttttaagtgagtttgttcattgcttagctttgttgctttctcatgacggtttctaagccccggg

SEQ ID NO: 2508 - DNA, 2219 bp, Mus musculus
ctaactctttcgacatcggggacccaggttcggggttggctggagtggtggaccgcgctggcagggatgctgcgcagctgcagctcctcctaggtgctttggacgctgctttgctcttcgcgcggagaatgaggtgtcttcacacacagctcctttacagctctggggaagcagtagagagcgtagaaccggtctacaggcagagtcctagaagcctggcaaaatgaaggatcggcttgcagagcttcaagaattgtccaggagctatgaccagcaattcccagatggggacaatgactttgacgctcctcgggaggacatcgtgttcgagaccgaccacatcctggagtccttgtatagggtcatccaggacatccaggatgaaaaccagctgcttctgatagacgtgaggcgcctggggaggcagaacgtccgcttcctcacgtccatgcggcgcctcagcagcattaagcgcgacaccaactccatcgccaaggccatcaagacccgaggcgaaggcatccaccagaagctgcgctccatgaaggagctgagcgagcaggccgaggcccggcacggcgcgcactcggcggtggctcgcatctcacacgcgcagtacagcgcgctggcccgcgctttccagcaagccatgtacgagtacaaccaggccgagatgaaacagcgcgacaactgcaagatccgcatccagcggcagctggagatcatgggcaaggacatgtcgggcgagcagattgaggacatgttcgagcagggcaagtgggatgtattctccgagaacctgctggccgacttgaagggcgcgcgggctgcgctcaacgagatcgagagccgccaccgcgagctcctgcgcctggagggtcgcattcgcgatgtgcacgagctcttcctacagatggccgtgctagtggagaagcaggaggacacgctgaacgtcatcgagcttaacgtgcagaagaccctcgattacacgggcgaggccaaggcgcaggtgcgcaaggcggtgcagtacaagaagaagaacccctgcaggaccatctgctgcttctgttgtccctgtgtcaactagcagctggcttgagtctccactgcacgtgccatgtgggaaacatgtccaggatgcccagccaaaggcatcttgcactgggccgagggagagggtcccaataccttgcagaattcagagcatagagaaagtgggggttgggatgcaagatttggagtccggcacctgctgccttcaaggaatagttgttaatatccaatggctacttaatgtagacagatttccactggcgttgtgtgatgtcattataaaatacatagcactcagcatcacggggaggaactaaggtcatttgctaagatgtgtgtcttgaaaggaggaagccaagagaacaggatgctaatagtatgagtacattatcaaaagttgcctttgtttatcctctctggaaagttccttggtgctatatggttttgaatgacattcacttcagtattcattacgtctgttcattttcgtggaactttgaccttgggtaaattggctgccattcacttctgattatttatgttgtgtgagccctgcgtgaactccttcccttggctcgctcccactacacagtaaccctcactggacactggctccttacctctctcaccttttatatcgtccaccagcttatatatgaatatttttaaagcaccaaatattgaacaagcactcaagttgagctttatattggtcacattttatggatttttcacagataacatttatttaaaatttatctttgtacttcatttcatatgaatatgggtgtaattgtaaactaatctccattcctatgtgtacattaatggccaattagattgactttgcttttggaaattctgtatataaacaacaagagcagtttttgctgtgtgccattgtttgatgatcctgagtgtatttcatgcctgtctgcacagtccagtttgggtctaactttattttgaacaactgtgtgctgtcattaataaagagaagcgaggaagattggaaacttgtgaagcagctagagatgctaaagtgaggttcttggggatagtaatctaccttactccgagccattcctttctccattaaagcagagagacttcaagtaaaatcttgtttttcaaataagtttaataaatatgaagttataactgtc

SEQ ID NO: 2509 - protein, 283 aa, Mus musculus
MKDRLAELQELSRSYDQQFPDGDNDFDAPREDIVFETDHISLYRVIQDIQDENQLLLIDVRRLGRQNVRFLTSMRRLSSIKRDTNSIAKAIKTRGEGIHQKLRSMKELSEQAEARHGAHSAVARISHAQYSARAFQQAMYEYNQAEMKQRDNCKIRIQRQLEIMGKDMSGEQIEDMFEQGKWDVFSENLLADLKGARAALNEIESRHRELLRLEGRIRDVHELFLQMAVLVEKQEDTLNVIELNVQKTLDYTGEAKAQVRKAVQYKKKNPCRTICCFCCPCVN

SEQ ID NO: 2510 - DNA, 57910 bp, Homo sapiens
  misc_feature (1)...(57910): n = A, C, G or T/U
gcctggcccaattcatcatttgaaacaacttgtttttttttggtgccagtattgcactttcaaattttcttcagggtcatggaaggttgctagcaggctgtggtctgtgaactcacagaaactataaaccatccgtgaagaaggaatgggtccatctgaagagtgccaaagggaaaagtaagacaaagacatggagcagcctcaaggggatgaaatggatgaaggggaggaagaagagaagaaagccagatctcagccccaaagtaaggcttcttggcatggaagtatagagtttctaaatagatgacacaaattcatctaaatgaacagaatatggctatacaaatgtttaatgtatctgtgaaaattacacttgttgaaaactaattattcacattcaaaaccagtatttcaaggcttgtggctaaactaatatctgtaaaaggcatggcttatgtgttatattctgtttgtgcttttccgtttcacttttatctgttctgcagacgaaggcaatggtgcaaaaaggagtttaccagaaatgagtattgagtaacagtctgatcttaaaatacttttgcaacttgttatgcaaaaatcacagttgcagaaaaattggtttccataaagagctattaagtggatcaactagattatctctagatcagattttttaaaaacccattctccttcacagaaaacttttgttctatttgtatacgttagagcaaccagtacatatcaaacttcaggcctcttacaagtaagcaaatatatcaaagaaaagtttttacttaattgaaatttgggttaaagtaaagatgcaatagtgtcaattcaggaattataggcaggaccacaatttaacaaataccaaaataatacgatttttcgccacatgttttctacccctattggcgtatcaagcttggaaaaagaaatgatcttagtaaacaacaagaaatttgcttttctgtgagagttatctgttgcattcttttctttttttagtattttttctaagcttaccttaagttcatattgcccttttgtgcagataacaagatgaaaaaaatcatttactttggaaagtcattattttcagttttgttgttgttgttgttgttgttgttgttgttgttttgttttgagacagggtctcattccattgtccaggctggagtgcacttgtgcaataatggctcactgcagcctcgaattactgggcttgggtgattctcccaacacagcctcccgagtagctgggactacagacaccaaccaccacacctggctaatttctttgtatttttttgtagagatggggttttgccatgttgcccaagctcattttgaacttctgggctcaagcactctgcccacctctgcctcctaaagtgctgggattacaggcgagagccactgcgcccggcctcttctgtggtctctaacattgttcttgaattattaatggtgaagaacctggatttttgtgttgcacactagtatttgagtctgaagtcttctgcttgttgtttcctggacagtggacaggaggctatagggttcagtctattcctctcttaaatagggttgagttgtgcacatttcacaaatttgtgatgagaaattaaataatatacgacgatgtgaatatggtgcttagcacattgtaaccaaacaatagtattggttatctttaatattggtatcagcattattaggtttatattttttaatgatctcatgtttgctaaaaattgtacatttaaaacaagcttcaagggataaaaactgtgttgtcttgtatgtgagtaatgatgacttgtttgcagtactgaaacctttgcagatttcatcacatatctagaagtaatttaagatatgcttattacatactgaaatatttaaaactttaacttattatatattgaaatatttaaaactttaacaattaacttgattttactttgtaaatttacatttatgggataaagaaaatgtggtatataaacacaatggaatactattccgccataaaagaatgaaatcatgtcatttgcagcaaaatggatggaactgaaggttattattttaagtaaaataagccagacataggcaaatttcacatgttcttactcatgggaggtagagagtggaatgatagatagataccagatgctgggaaggttgtgtgagtggaaagggggatgaagagagtctggtcaaagggtacaaattacggttggataaaagaagtaagttctaatgtttataacagttctattgttccattgttgctaactatagctagcaacaatgtattgtttatttcaaattagctaaactagggaacttgaaatgtttccaacatatggaaatgattaataactcaaggtgagggataccccaaatacctggacttgatccttacacattctatgcatgcaacaaaatatcatatgtaccccacaaatatgtaaaatattatgtaccaattcaaaacactaaaagatttctcatttatatgtttccatcaatttatttctacattttatgtagaaaagctatatgcaaaaagatttgcctgtgaatctgggaatatatttctagtctgcgtgtactggagaacaatttatatggcatacagtctggtttctccataaagctaataagtggattgaaataatgatatgataatatcactagggaacatttctgtcaggattgtagttataaaattttcagagatgggatttggagactatgctctagctactaattaagaagactgtattagttaaagtcccaaagggaaatggatagcatattcaaattaggataattcaagcagaggttttaaataaggggtctattataaagatatggacagggtggaggggagctgtaatggaacctttgactgagaatcacaagtatggaaaagtatctgaaaccaggaagggagagagagacgtgtagagaagaccaccttagaggaattggggccttttgttgaggggcatacacgaacttctatttggaatacatttcctgacctcattccctgcccctgtcctcctgccagttttcctatttgcaggaaagctatggggcacaggcagctgtcagaataatccattcagatcagactcccaagtcagagaacgggtgggagggaggtggaaagtggattggaggggcaaaaggagatctctgacacatgctgatactatacaaatctagaatttattttctctcattattatgttcacttatggtaacaggtgtttacaaatcagagtagtagctttataaacatgcattagacaagatccttataggcattaaattttaagctactttttaaataatggggaaaagaccctagcttaaaatctatgctctgtaagaaaaaaacatattttctaaccattaatatatgagagctagacagatattcctaggtcttgttatgtctaggtgcctccctctaaaaggctgtatcagggccttcaactcagtgcttactacagtcattcattaactcatctttcaacaaatatttattgagtgtctctaatgttctaggtattgtgctaggctctaggtaaaaaggagtaagtgaaacaggcatgatccttgccttcttgaaacttatgatttagtaggtgagttgaatgatgtagacaaagctttaactagttttgtaagtctgcaatcacagagctaataaagagcaacagaaccacatgatcactgagtgtccaaatacaatatttaaacatgaaaattagagagttcacagagcagccattgaggtacaaaaaagccacagacttttaagcagcatattttctctctcctgaaagaaagatcttaaacttaaatttaaagccggccagttctggaaaagcttattcaaatattatttgtaagatgaggcagaggtggctaccagaatctagaaagtgctgtccaatatagaagccaaatattaataactgtctacaataatggaaatattatattctgcactgtccaaaatagtagacactagttatcgtggctgttaagtacttaaaatgttgctaatgtggctgaggaactgaatttttaaattttatttaattttaattaatttagatttaattagccatatgtggctatggtaaagtacagtgtaaatctagaacaaggtgtactggctgagacttgctgagcacaagctgcttcatttaacctcatttcctttttgacagggttaataacggtcattaatttactcacacactatcatgtgtcctgcagggtatgaaatagaaatcaaagatagtctaaggggaataagtgttggcaaggaggtggagacactggaacccttgggcattgcaggtataaatgtaaaatgtcttggctgttgtgaaaaatggtaatgataattctacacaaaattaaacatagaattaccatatgacccagcaaattcatttctgggtatataccccccaaaaatgaaagcagggactcaaagagatatttgtacactcatgttcatagcagcattagtcacaatagccaaagggtggaagcaacgcaagtgtccattgacaggtgaatggataaacaaaatctggtatatacatacaatgagttattactcagccttaaaaaggaaggaaatactgacacatgctacatacagcatggataaacactaaagtcataatgccaagtgaaataagctggtcactgaaggacaaatattgtatgattccacttatatgagatacttagagcagtcaaattcattgaggcagaaagtaaaatggtggaatctagcaatttcactactgggtatatatccaaaggaaatgaaattagtgtgatgagatttttgcatgtccctgttcattgcagcactttacaatagccaagatatagaatcaacataagtgttcaacagtggatgaatggataaagaaaatgtgatatatatacacaacgaggtactttcagccttacagaagaaggaaatcttgtcattgtgacaacatgaatgaacctggaggacattatgttaagtgaaataagccaggcacagaaaaacaaataccacatgatgacacttatatgtggaatctaaaaacactgaactcatagaagtagaagtagaactgtggttatcaaggactgagttagagagatgttagtaaagaaaaaaaagtagaatggtggttgctaagggtgagagggaggagagaccagggagttagtgtttaatgggtgcaaagttttagttgggaagataaaaatgttcaggatggtggtgatggttacaccacaatgtgaacgtacctgtatttaatgccactgtacactttaacatagttacaatggtaaattctatattgtaaatattttatcacaaccatataagaagtttaaacacattctttatctgcaaagagttctcgaactagcatgaaaaagagaaatggtagttgctggttactacatggtacagggatacgcaatgactatttgactgagggccatgaaggagttgcacctcagaagggtggctgtgctagaggaccttccaaccctgggattcaatgggtttagagctctgtaaattaggaacggcactagcgtgcaggatgatggccacggctgacagatcgccatgcaactgccacgccccgcacccagtgcctgctctgttttatctgagcttcaccctaaggtccttatcggtcatcatctctgaaaaactccagactggaagggagagccaaggtctccagagaaatttataaaacaagaataatctggggtttcagctgggtgtgagcagatcaattgcggaagataattcagattggccatactctaaaccctgtcattatgtgccaccatgcccggctaattttgtatttttagtagagacggggtttctccatgttggtcaggctggtcttgaactgccaacctcaagtgactcgcccgcctcggcctcccaaagtgctgggattacaggcctgagccacggcgtccagctcttgcttttaatttcattgataaaatatgttcttgcctccacatttaccagcatctctgccatactttctgaatagctgggacaacaggcatgcaccaccgcacccggctaattctttgatttttagtaaagacaagatctccctatgttgcccaggctggtctctaactcccgggctcaagtgatcctcctaccctgtcctcccaaagtgctgggtttacaggctaccacacagctgagattatcatttgaatccatgaggaagactgcctgaaaaagtaaattgtggatggggagggaaggggaagattgctggggattaagtgtggcattttggacacattcagtttggagttgttctctcctgttaccagggatgaactctttcttctgttttaccctaaatttccatgtgtgcattggattgcacacctgctcatctactcaagaacattgctccagcatgtaacccattttttctcccccatatcatccctctttccattccttttggttcatgctggtgagcaaacaaacatgtatagcttctaattaaaaaaaaaaaaaactgctttgactatatggttccttcctgtttctactccatttctttgtcttcatctgatgtttttattctttcactccaaacaggctttggtcatcccccactaaaactcttcttaccaagctcaccactgacctccatgtggccaagcccattcctcagttttccgtcctaattttacacactgtagcagcatttcacagttaattgttcttttttacaaaaatttttttaatttggctcctgaaacgtgctctctcttggtttatctatctcactaatcagaacttctcattctctttttttgattctttatcttcctaacctctgaactttggagcatgccaggactcagacttcagacatccccattctgtctgcacaccatctatatgctaaagaactccaaatatataccaccatcccagactcacctaaccaactgccttcatgacaacttgacaactccaaactgaaggtgtccaaaatgccactcttaatccccagcaatcttcacctttcctccccatccacaatttactttttcaggcagtcttctccatggattcaaaggttaatctcagctgagcatggtaactgatgcctgttaacccagcactttgggaggccaaggtgggaggatcacttgagcaggggaggtcgaggctgcagggaaccatgatcatgccactgcactgcagcttgggcaacagagtgagctgctgtctcaaaaaaattaaaaatgtcatcagcaagcaccctcacagacacacccaggataatgttttaccaaatatctgggcaccccatggtccaataaatttgacacatcaaattaaccatcacagctttctaactcgttggcctgttttaatctttgtcctttaatctgtcctcaacaaaacggtagattaaaaaaacaaccagcaacatcatttagcttctctgataaacattcttcagtcttcctgtctcaatcaatgtaaaatgtaaagactatcatgactaccaatgccctacatgctctactccccactcctagccccaccaccatcactcttcctggactctgttttgcccacgctgatatttctcccagaagcccagcatgctcctgcctcggggcctttacatccactgattcctaggcttgaaatgatcttaatcccaatagctgcattgtttcctccctcaatgattctcttatcttagatggctttgcaatatacccatttttaaaaatataacatacctcatccctcttattttactttcttttaaaataaactgtattttttagaaccgttttagatttacagaacaactgcaaaggtagtacagaatttccataaattccatttcagatttccctatgattaccatcttacattacattcctcacaactaattaatcaaccttgattcttattactaatgaaagtccatgctttatttagatttccttagtttttccccaagtcctttttctgtcccaggatcccatccaggataccacattacatttagttttcacgtctcctgagtttcttctaggctgcggcagtttttcagactttccttattttattttattttttgtagagacagcatctggctatgtcggccagatcaggcctcgaactcctggcctcaagcaatcctctcgcttcagcctctcaaagtgtacggattacaggcgtgagccacgtctggactgtactttccttacttttgataacctgacaactttgaggaatattggtcaggtattttgtaggatgttccactactggaatttgtttgatatttttctcattatgagactgaggttatggttttccaggagggagaccacacatgtaatatgccacattcatcacatcatattgactacatgccatcaatgagtcacgattgttgacgttggcttagaacatctggctggggtagtgtctgtcggctttctccattgtaaacctactgtttttccctttccacattgtactattttggaggaagtcactgtgcacagcctagggtacatgatctacataaattatttggaattattctgtataggagatttgtctcctctccgccttttatttatttattcaattatttatttatatcagtgtagactcatggatttttttactttggcttgtaatccaatactaccttgtttagtttacttcgttgctcaaatggttccatctttggcaactgggagctttcaggtggttcctgtgtctaaacattctgccatcaaggcaggattcgttctttagttttattttttttcttctcattcaattgagacagcgtctcattctgtcgcccaggctggagtacagtggcgcgatctcggctcactgcatccttgacctctcagcctcaagtgatcctcccaccttagcctcccgagcagctgggatcacagcgtgcgccaccacgcccagttaatttttttattttttgtagagataggctttcaccacatcgctcaggctggtctcaaactcctgggctcaagagatcctcccccttcggcctcccaaagtgttaggaatacgcgcgtgagccaccgcgcccggcccgatttttccttttttgagtatcacttccttacttttcagcctcagccttgtttttcaaggtgctttaccaccacctggcacaatccacactttctatttatccctccccgttaaagtgccgggacctggagggtgggtcttggcagtatttttgagcgcggtgggcacacaaggggacgctcagtnnnnnnnnnnnnnnnnnnnnnnnnnnnnnnnnnnnnnnnnnnnnnnnnnnnnnnnnnnnnnnnnnnnnnnnnnnnnnnnnnnnnnnnnnnnnnnnnnnnnnnnnnnnnnnnnnnnnnnnnnnnnnnnnnnnnnnnnnnnnnnnnnnnnnnnnnnnnnnnnnnnnnnnnnnnnnnnnnnnnnnnnnnnnnnnnnnnnnnnnnnnnnnnnnnnnnnnnnnnnnnnnnnnnnnnnnnnnnnnnnnnnnnnnnnnnnnnnnnnnnnnnnnnnnnnnnnnnnnnnnnnnnnnnnnnnnnnnnnnnnnnnnnnnnnnnnnnnnnnnnnnnnnnnnnntcttgggcggcaaacatcccactccccgcgccggtccgcgcagcccgcgggaacgcccctgggcttgcgggaggggctggagcgcgtccccggctccgggcggtcccgagcgcatggactctgggtggggcgggaacccgcgctctgtgagccggctgccgccgcgccccagcgctgtcatcccggggcggggcctggtccccagctgtggtcgcttcctaagcggcgggggctgagccggcggcgcccagatgcggccgcggcggcgcggagctcgggcggccgtggaggaactcagcctcggccgcaggaggcgccgggagcggagccgccgggagtcgcgcaacaggtttccttctccatcgctgcgcccacaggggacgcgcgccctgccgggagaggggcttctcggttcgcactctcgctcccagtccaggtttgtttttctcttcctgagcccccatttctcttcctgactattttccccgtgcgcggagagatcggggagggcgggtcggggcgggggcactgtctaggctcgggacccgcggctgtgccttaggtgggattttggatctggcgcaggtcctcacgccgcctctgggcaccttcggaaacacagcattgggtttctcatataaagcagaatgattttttaaaattacttttaatttcagaggctgagggacttaggatttagtgcttcgtaagaattattttagggatacctgttggtaggctgcctttataaagtgtccacccaagactacttttattttaaatcgaaaggctggagtgtttttttattatcacctcttcacttcctagtagggtgactgtgtcaaaaacaccagaatgggtacttcttgacttgaacttggcggtgtcactcagtagccaggaaagacggagaaattgatagagccttcgaggagtcccttcgaagcccacgtaagactttgttttagaaacatggagagaagtagtggcaatgcctgcgagagccacgccgtcctgagagggaattctgcctttttctagactccgctgacaccagctgagatctgtattacttcctgtggttctcacgcacttgtttcagccgtttctcagcagagggaggagctgttatttacaggtatccaaaaatgagtcacagggctgctctcttaattgtgagactttgttaatgaacttttgaaaagcgaggcttgctttaaaatgagactctagatgtgaaatgcctgccctgccaacctggggcagtggtatgggaagtgacgattgagttttcagtttcctaaggcgcctgatgttacaacatgccagtaaaggtcactgggctgatctaagataaccattgaaatcatgtgctttgccacagatgcccaagagaaaattaatttcattattcaatgaccattttgctgtcattttcactgcatgggagaaaggtatcatttaatgtggtgattgtaagtaactctctaaaatcaaaatatttcagacagtttgtgtttactaaattggtgctaaaaccacatgatgatttttgaagcgggtgggtcccagcgggagcagagaaatttaaaagttgaagctgacaagtcctattgcggtgggtaacagcccttaggaagggactgcacactatctcaacacggtagagaaggggacaccatctctactggagctgagttgagctgaattcagcctcaaacaacagttaccaggtaccttctctgtgccagcctcttccctgaaccttgcttgtacaaccatgaataataggatcctgccggcaaggtactagggtaaatctatacccagagtgaagtttctgtgccaatataactcaatatgctgggtcccagtgtatttaaagagtagactcagcagattatcacccctagataattgcggtcacgattagttgatagtgtgacttttaagaaatagtgtgactaattaatagtttatttaaatatgctggaaaattcaatataatgagataggtgctagggtaaatctatacccagagaaaagtttctgtcccaatatgactgatgtttctgaagatctgggatttggaatggactgggtcatggctggaagagcaaggaaacttttgagtttagtcatttacttgtctttgtaggcagcctattcttcatttgatacatgatttaaaaatgtatgaatttgaaaggtatggtttttaaagtgcttgaatgaaccatgtttcatgttatttaataaccatgtaaaacgaaattcagctgattatcacccctggacaattgcagtcacctttagttaacagcatgacttttaggaaatggtgtgactaattaataggttgttttgttttgttttgttttttgagacagagtctcactctgttgccccaggctggagtgtggtggtgcaatcttggctcactgcaacctccacctcctgcgtttaagcaattcttgtgcttcagcgtcccaagtagctgggactacagacacccaccacaacacccggctaatttttgtatttttagtagggacaaggttcggccctgttggccaggctggtctcgaactgctgacctcaggtgatctgcttgccttggcctcccaaagtgctgggattgcagatgtgagccaccatgccctgcctaatagtttatacattggtaacactatattgaagcgagtttatgatcattgtttttgtagttcaaatcaatgttttttatcacattatagccgtgtgagccaaaatgaataaatctaccgtatcacagtttactgttgcaattgaaatctgctgagatgcttttgaactggatgcccaagtatcaaggtttccaagtttccccagtttgctaagatatccaactggtaaaggcaacaatgctaaatttcagacaactttaccttaatttccaaactttattcctcctttgagagccctaaagttactttttctatgagaaagaaagggtcgagtttgtcattcagcattgtactccctgaacttggcccaggcttgtctcatgataagtgttagaaagtgtttattgatggaataatgaaccttcacgtaggaggatgaattgtcaggcaagtggaattgtctgctgtaggtgacccagcagaaggaacagcacccatagagaagtgaaacagcactggacgttcaggaaactccagcctgtttagtgacggcacagagggaggcctacggagacaggaagggccagatcacaaaggccccatgagggtttaatagtactgaagcctttgaacaagtgaatgatattgtcaggtatgtgtttaaaaaataataacaaaacttggaattttaaaaatcttagattagatgagagtgacattgaccctaggaagacaccgtggaaactgttgtcatattgcagatgggacattgaagaaggcctgaatcgggcagtgacaatgcagatgggaaaagagggaaggggctggtagaggtttaataggtggaaccctgtcgggtgtgtgtaatgaggaggtaggagcagttgagatgactcccatgtttctaatgaatgactaggataagaatatcctactcggtggaagaataggtttgggctaaagggtggtgaggagctcacacagtacttggcacataatcagtgctcattaagatttttcaaatgaatgctagtaatagctaaaatttattgagtgcttattaagggccatgtactatcctagactcactatgtgcgttaagccttttactcgtcagtacaatcctgtgagataggtactcaaattaactgctttgactggtgaagaaagtgcagtgttagtaactgacagagccagaaatggatcccaagcacttggttccagagcttgcattctgaagcaccctgctgtgatgtgctgtcttgatgaatgaatcaatgaggttttggactttgtggtaagctcaggttgaagtcactctcctgcccctaacaattcttccttatccaagaatggccttgatgcataagatgggccttcagtgtccctactgtgctacatgacatcccaccccctaccttcactccaagaaatacctgattcatctaggaagaaacctggaataatcagacatttttatcctgggaattgaaacatcttaatggagactcacagtgtctgaaggttccaagtgcttcaatcattgtgtctacagagctgccttggttaccacccctcctaaacactgaatgctcaacttttcatatttctcagatgcactcaatgttttgttgctaagattttccatagggaagcagaaaggctagcaagggaggcattaatctacagagcagggtcaaatggtggaagaaccactaacaaatgcagacaggtacataacaactccagatattacattcctgacttgtgatctgccttttgaatcctattttgttctagttttaccctgaagcaggcgccttacctgcctctaacttccagaattttattaagtgagtctggtcctgctgtgtctcctgtcctcttgattttaacttggcaaaatgattcaagtatcttgcattcagaacttgctttccatttggggcacctgggtagattcttttgtctgaacagcagtattttgaccaacaaccctgtccacccgcccccaccgcctccaaaaaaatgatcccaactcttaactgttctcattgttgataattcaacctaccctgacttggattaatatcctgatttttgttcagcaatcagggactaagaattgatctaggaagaaactggaataatcagaccttttctcctgggaatttacattttaatggagactgtctgaagattcccagagcttcaaccattatgtccacaaagctgccttggttatcttttcctcaaagacctcgactttggaccatgtaaggtttaaaacgcccaattaatgttgtacccaaactgaatcagcaaactcacttattgaagctttaaaatgttcaaatgtccactttgggaggctgaggcaggaggattgcttgagcctgggggcagcggcaggggcgggggagaatgttcaaatgtctaaagcttgaagttttaaaatagtttctccacacatgcattgaatgttttgttcagcatttcttcagattcattgggaaatcaacatatttatagttgcccatgaaatgagagtgacatgaagcctcgcagggtaatagagcccacatgtctaccccttggcctgagcttttatgtgcctgcctataattcattcagtgctcagatcacaagaaagggaagggttttggctaatatttcatatcggtttgtcttggctgttcaattcaactgtggtttccctgagagaagagaatagctagagttgggggctctgttaagccacctctaaggctcctccccgtcctaataaccattctgtgtcttttactaataatgaaaccatctgtcagagtaagtcatttcttggccactccttctgagtttatggataccagacattatctgtgtatttcattcaacttctttgtaaggctcagtaattgggtaatttttagaatgatgtagagttgtagaattggtaattttcagttgcccttcttgagctaattaaatgtgttttaaaatttaatctttctttctttctttctttctttctttctttctttctttctttctttctttctttctttctttctttctttctctctttctctccttccttccttccttccttccttcccctcccctcccctcccctcccctccccactcctcaggattttcccttttattgcacaggcgggagtgcaatggtgtgatctccgctcaccacaacctccacctcccgggttcaagcaattctcctgcctcagtctcccaagcagctggaattacagggatgcaccatcacacgtggctaattttgcatttttagtagagatgggatttctccatgttggtcaggctggtctccaactccctacctcaggcgatcagcccacctcggcctccctgagtgctgggattataggcgtgagccactgcacctggcctcatttccttcttttcagtggataggacatcacaataatccagaaaatactaagtcatctagaaaagtatttcccattttgtatacttgttttacttgtttccctgttcaaagttgcaaagagatattccattactccttgcataacttattgtgtaataaggtcaatttcagcttttcagaatagtgaaatagctctgtttttatcttcctatggaaacagtaagcaagtagttctgtcttcggtttcagtttcaggattgcagcaatctcttttcacggttatatttctaattttctattatgttctttgttatgttgattagtgacccaaatctgttgatttgagataagtaggacatagtgtattagctaaattctgtaataatacaacatttcccacctcctcctcccctcttccttgactactgcatggtaaaccaacatataatgatattcagctgataatattatttagctgtttattgtttatgaagtactgtcatatatattatttctgttaattctcataacagccagaaagaatggaaaaataaggattcattgttgctgttgccattatccacattttatagataaggtgggaaacacctggagagattaagtgaccacccaagattgcccaagaagttaaatgcagaggcctgctacatgatgctgtcaggacttgactgaaaggcgcaagttcagtgtctcaggtcaagttgccaggaaacagaccctgagactctgagatttccatacaggaggtttttattgggaagtgctctgggcacaatacacagtaggagagagggaaacgggattgcacagggggagagactgaactgtggggcatgcacaacagcggcctcaacagggaggagcttggaagctgggattgttgttcagaattgttctgcctcctgaggcaagaggctcagcatttgtacctacatcaactaatcattggatgcaggcagcagctcccttcagtccagggcaatttctggaactgggagccttcagcagccaaccttcctagtacctgggggactgaggatcttggtccagaaggggatctggataccacatcatttactacatttgtagccaagagagcattctcctctgcaacagccttgtttgtgtctgatggcccagaccatcaccttgcagagtggagcccagaaagttgtcatttttttccaaggcccttaaggattttagaatagttgaccagagagcaagaagacaaagtagtcttaatcctaagaagattaggagcagaagagccagggagagtaggccgtggtgagggcagtagtggtgtttaacaaagaaggctaaactctggcacccagagtggctaaactcagccacccaaacagctgtggctatccagacccagaacaaaagcataacacacaccagtccttgctgtaatgctaggctttaacattgttaaatgttgaacaattttgtgatattagggttccccccgctctctctctcgctctctctttcaagcccttgaaagtcctcaaaccagtccagtgtgtagtctgtagattataaccttcagaattaccaaagatatttcagtacaaaaaaaaaacaggggaaaaacaaaaaaaaaagaaaagagaaataaaagtccagggccccattctagatccactggaatagaatccaggggtggaacccatgaattgacattttcaacacattttccccagaagattttgatacatgctatagtttgagaaccttcaccctaaactcttatgcctttcgtggtgaccaactctattgagattttttcagattatccagaagtcatgggaaccgtgggacagcagaggagcaccggagccttagtcccagcaggcctggtatagtgagagtcatcccttgcttttcatttaaattcttgatgtggccaacagacagcacagcccaaattcctttgctggcttctgaccaagattgcaagagggagagtggtgtccctggcttggccttatactatcttagatagcagagtgagagatgccaaattttttgaatagttgcagatgggggatgggaatcagtgaacttagaggaatcagtaaactttctaggagaataagaaggtttcaggatatcttatgccagaggaagctttgaggtgcttttttttaaactttaataattgtctaataagatcagagataacttacaggataatgttaagcattcataaatgtaggatggatttctaggagaataagaaggttttaggatatcttatgccagaggaagctttgaggtgctttcttaaaactttaataattgtctaatgagatcagagataacttacaggagaatgttaagcattcataaatgtaggatggtatattatctgattcactgacattggcaatgattttttcttcaaagggaaaagcacttttaagcctaccaatttttactcctgaaacaccaaattgctgtgtttcttacactttccaggcttcatgcctttgctgaagttgtctgtgcctgggtccctttcccttctccctaccaagctaactccttttaaaccttttaggatcagctcagacaccaccttccctgccctgtggccagactgacttctcaaagtattcccatagatccctctattatggcatttattatcattattctctctaacagcctgtaagagcaagaacagtctttttcatttttgtgtatgagagacctagcctcatcaaaaatgagtgaaaaaaataacgattctggtgagcgtatttattcaacaactatttatcgaggctttcctatatgccgggtgctctggagtaaatggtgcagacacaacaggtacagctcctgaccctatgaagcttatgggcaagcagagaagataagtaacaattgaatatgttatcaaacaactaccaataaaatatggtgagtaccagaaaaagcgaagtgaaattatagagctggaaacccagcctagtctaaggtcagaggaagtgtctcattttcctgaaatataagttatatcaaaatagaagttacggatttggctttggttacaagagactactttttaacaaaggaagatcttttggttgagctagttcaaaattgactctgtgtgtgtgtgtgtgtgtgtccgtccagtatgtggaaaaagacagtacaggaaaatgacgccttcatttaatgaggtaaaataggtaacaaggaacggagagggaagtttctgtgtgtctcattcaatgcaccattactagaagttactttgttaatattttaatatgtaatatacagtggaagaaaataaatgtaaagctctgaaaatcatgaacttacatcacagccttttaaaaattaatctcaaggatctgattactacggcctaggagggtgcttgacagatttgcttttgggtcttgttggagacagtgggtgaagtgcattgccccagaagtccatgcccactgaggtttctcatctttccaggtcacttttgatgccctgggtgaagaggccacaaccccagtgttgcaatttgcaacctccacccagcttggtggctcatgctgggtcctttttctccttttctggccagttcttgttttttaaaaaaatattatgatttttgagagactctgtcgcccaggctggaatgaaatggcacaatctctgctcacagtaacctccgcctcccgggttcaagtgattctcctgcctcagcttcctaagtagctaggactacaggtgtgcaccaccacacccagctaatttttgtatttttttagtagagacggggtttcactatatttggccaggctggtctcgaactcctgacctcaggtgaaccgcctgcctcagcctaccaaagtgctgggattacaggagtgagccactgtgcctggcctttttaaaaattatttttgtacctccttatttctccccataaattgtaagcttagggtaaggtttgagacttcctgatttttaacttttgaagctttgcagctcttctgctgcaatttatttacatttattatattcaatagataaaggaccttaagtttaatatataagttaacaggcaaatcttgggttgaaaaagtaccagattcgttctctagtaagaacctatttcttgtttaacctgacatcacaaagcaaataggccaagtgctaacatgtgcatatttaacctatgaacctctacattaagtactaagaataccaaacatttggctgattgcagggagggagggattaattcaccataaagcagcacttactagatgtaggtggagttatgtaatcctctgctgtgtcccattcaagtggataaacatatccacaccattcagcatcttgaccacaaagacaccaaaaaaactggaactataaattatagtgcaagtgaacatttaactcaggcttgaagtatgacttcaagtgaatggatgtgtgaggtcctgtgatgacgaccatttgccatgtattttcatatctttcctcaccccctttggcatattccttggtttatctcaagtataacttgattcatgttctcattttttgtcttgcttttaccataaatattatataaaaggagcatatgaatggtaaagaaataattctagacatctgttcttgcacttttcattttgtataggttgaacttggttcattgctgaagtgtaggtaatgattttagccacggtaaatccagttgaatacttaattaactgtaaatgagctccatttattatattttcatgaagaatttgaatttttaaataagaagcaatgatggcagaatggagtattttctctttttgaaagtaaactcgttagaggatgaaacgtattccttaaggaatcaaaattataatagtgtcacttcatctgaaaacattaacagttagtggaggaaaatcctgtttagtcagcatatttttggattctttaattggaaattttctttttttctcctttgagacaaagtctcactgtcgcccacgctggagtgcagtggcatgatctcagctcactgcaacccccgcctcccaggttcaagcaattctcatgcctcagcctccctagtagctaggattacaggcgcccgccaccacgtccagctaatttttgtatttttagtagagacgagctttcaccatgttgatcaggctggtctcaaactcctgacctcaggtgatccacccacctcagcctcccgaagtgctgggattataggcatgagccaccgcacccggccggaaaatttcttaagttattaactgccttttgctggaacttcaagtgctatggatagtttgtatttctgttgacatctagatacgtgcacccaccactgttaacagcagcacaaacacaatacatattttcattcgtaggatgttttctctctgaaattcctattatttggaatttgaatgtaaggggctggacctctaagctccttatctttactctgttattttttcaactcttttttctttctttctctttatagaaaaagatcttctatttttctgcctgtaagatatagctcagtgtgctggtaagtaggtgaaggaggagggtttgaaggtgcaacattccatgtaaaaatattcactgaatcctcctcttttcagttggctacctctaccgcactctagattctcttttaccctgttcagagtctaatctgtcatctgtctactcttctgccagggtggaacagaggatggagggccctcccacttctttaaaaagcttctgaccaaacccaacttgttattaccccaccatcacgccctttcccgtagatactcggccttttattatgagttctgagtctttagaaatttatttgatggtgtaacttcggttgcttcttggacttctccattgttcactgaggatttaactttcttaaatctactagaccaattatcatttatccatttgcttcataatttccaacattgtgttgctgttttcttctctcttattctttatcctagttggcttatgcctttagaaagttcctttagtggagttttggaagggagcaaaagtaatgttcaatttgctattttatccagaatgtggaaggcgtcttcaaaaatgcaaatatgctttcttgatggagcagtatattaagctattagcacttacaagcagatacattcatcagaacagttgtttactgccctaaaacatagaggatggatcataggcatgggatgttttgatggacaaatttgaatttggataggggatgggaaaggttgagggacatctctggttggagggcatctccagaagaaaggcaggataaggtggtttgccatggtggagtttgtgtaggccaagacaggctaagagcagtaagtaaaaaattactcaactatcatttataaatcttcttgttgatattcatagaaagtgtgtatgtttaccaacatgagtgacaacataagtattatctaagaaaatacctgcatttgttgggaattcattcactgtgtgtaaataccttttgaggttcattgtcttattctagtttgctcagtgctaggagtcccatacaggcttattcgattctgcatccttatttaaacactaagctattctttgtgtcgtagttgaaaccagtgattgaaattaataaattcattgtaaatacatagaaaactgaagatgaatttctcccacgatcttcatagttccgtctttaaatgtgttgtgaacctctgtcagatagtcgataatggggaagttgcgtaagtcagttttggtttcaactgtgtctacatttaaaatatctcatcagtcttaccttctgtcaaatttataacattttaatttatttttttaaaaatgctttatgggctaggcgtcatggcttatgcctgtaattccagcactttgggaggccaaggcaggaggattgcttgagcccatgagtttgagactatcttaggcagcatagcgagaccccatctctacaaaaattttaaaacttagcccatggtgagacaccatctctacaaaattttttatttttaaaattttttttttaatttttgttttttgagacagagtcttactctgtcatccaggctggagtgcagtggcgcaatctcagctcactgcaacctctgcttcctgggctcaagtgattctccctgcctctgcctcccaagtagctgagataacaggcacctgccaccacacctggctaatttttgtattttttttcttagtagagacagggtttctccatgttggccaggctggtcttgaactcctgacctcaggtgatgcaccctcctcagcctcccaaagtgctggtattacaggtgtgagccactgtgcctggccccaaaatttaaaaattagctgggtggtggcacatggcttgtagtcccagtacccaggaggctgaggtgggaggattgcttgagcccagtggatggaggctgcagaaagctatgattgtgccactgcactcaagcctgggtaacagagcaagaccttgtctctctctctctcataaaaaggtttatgttaagtttttttgttagttttgttttttgcttatctagaaaatatactttaaaaggactgggaccacctatgttttgctcaccaagctgacctcatcatatcatgcctggcacataaatactcaataaatacttgttgaataaacacatgaaagtccctgtcagagtagcctgtgcaaacatgtgtcctgaaagatgtggataagaatatcaatcacatagtctgccttgtgaatattacttaaaatctcgttaaaagccttcccaacttggtttataaaaataaaataaagctaatggatgccattatttctatgctgttgtgtatattttagctaatagaattgaggtattttaatattatgttaaaatcaaatgataaagaatactcaacataagtaaaagtgaaagttaacggtacttaaaattgtatgcatttcatgatttctgggaatgattctgcatggatactgatagtctattcacaagagaacaaattacattattctttagctacagaattttctgcagttttggacatataaaaagatatctactgattcccatgataaacattaccagtatcactgcaaacatgcagcatctcttttatccaaattagaagctcacatatgagggaaaattaaaattctgttggtattaaaagatgtttaagatttttttcaatacctgtagatgttgattctatatagctttattttattttatttttcattttttgagacagagttttgctcttattgcctaggctggagtgcagtggcacaatctcggctcactgcaacctccatctcatgggtacaagtgattctcctgcttcagcatcccaagtagctgggattacaggcacctgccactatgcctgggtaattttttttttatttttagtagagttgcggtttcaccatgttggccaggctagtctcaaactcctgacctcaggtgatccgcctgcctcggcctcccaaagtgctgggattacaggtgtgaaccaccatgcccagcctatatagcttaaaaagagcacagttgctacatggaacagtttcaattggggtaaatgtgtaagaaatttgatctacgactactttttagttggttttgttttgcagggagatattggttatttgtcttctttgacaggtgtaatgcaatatattcactttgaagaaaaattttcttggccgggcgcggtggctcacgcctgtaatcccagcactttgggaggctgaggcgggcagatcacctgaggttgggagtttgagaccaacctgaccaacatggagaaaccccgtctctactaaaaaatacaaaattagcggggcgtggtggtgcatgtctgtaatcccagctactcgggagactgaggcaggagaattgcttgaacccgggaggcggaggttgcggtgagcagagatcgcgccattgcactccagcctgggcaacaagaacgaaactctgtctcaaaaaaaaaaagaaaaacaaaaaagaaaaattttctttacaataagtgagtttgttttcttagctccttttatatagtgagtacaaagcacctaactcttgtcttcctgaagtttgagctgaatagagcattaatatgctgtaacttgagttataggagtaatataaaaactaataatagaatcattctttggttttatagaatcattttagatcgtatcatctgcacatgcttccaaaggagtggtacttatagtatcttcaataagctacctgataaattaactgattatggatggtagtagttcaaaatactaactcctaagactgtgtttgtaaaatactttaaagttaacaaagtgctctcatgtacataacttacgtaacttaacaatcaaaaagtaacctttgtgaggtaagtagagttattaccattttacagatgaggaaatgacagatgttaattgtcttgctcaacttctcgcagctagagatggaaatgggaataagccctcgcttaccaggccaagtaccctttctcctacatggcatttgcttttcaaatgatattagcagccgtaggagtatctaccctttgcttcttgtttggaaatagtacttttaaggcttctgtctgttagatgaagaacaagatcttttcactgcgtgttcttgaatctaactgaaaaacctaacacaatctaccaccactaacaatgaaaccttattaattggtggtgggggtgaggggaatacagcttacctttctgagacacttatgaagaagagatgttcaacgtatatgtaatgcattaaaattgttaatttgttcccaaaagaaaacctagccactaattttataaacattaagtcttaaagacatcagtcctcagattggcttagatgcttcaagattttcacaatctctgggacgtgtggaattggggtaaccaccttgaggttcttaaacatgaaagcacacatgaggattttcttgcattctaaaatttccttttcttttgcaagtttccctcagtcttcctttctttctgtttcttttcttttctttcctttttttttttttttttttgagaaagagtctcactctgcggcccagctggagtgcagtggtgtgatctcagcccactgcaacctctgcctcccaggttcaagcaattcttctgcctcagcctcccaagtagctgggactacaggcatgtgccaccacaccctgctaatttttgtatttttagtagacccgggatttcaccacgttggccaggctggtctcaaactcctgacctgatgtgatccgcccgccttggcctcccaaagtgctgggattacagccatgagccacagtgcctggccccaccttccccctttcccccttcccttccctcccctcccctcccctctccttcccttcccttccttttgtctacctctctctttctttctttttacctgacttcacctgcacaaaaattttgttgatggaaagtacagtgtgacttgccctgtggccctgcatctctgagggatgcccctgggaagaagaaaccccagagagctcctgtagttttccagggaaacaaactaaatttcacagtaacaggattggttcttctgaacactgtctcttaagtgttggcaaccttctggtatagaaaagaatctggaagaatatgtattatattttatcattggttattttatagaattagtatatatagttgtattagatgatggaaaattgttacttttcatgttaaacaattctgtcttatttgatttattattacaagttgagtatttcttatctgaaatgcttggtactagaagtgttttggatttcagatttttttggattttggaatatttgcatatacatcatgagatatcttggggataagacccaaatctaaacacgaaatttatgtttcatatatacctatacacatagcctgaagataattgtatacaatgtttttaataatattgtgcatgacaaagtttatgtacattgaaccatcagaaaacaaaggtgtcactatctcaggcacccacgtggacaatctgtgcttgcttggtatcaccatcattcctgactctgaatttacatgctgctgataagcaatcacttctcctttttttcatttcttttttattttctttttttgagacaagatcttgctctgttgctcaggttaaagtgcagtggcacgatcacagctcactgaagccttaacctcctgggctcaggtgatcatcccatctcagcctcccaagcagctgggaatacaggtgtacaccactgctctcggctaattattgtagtttgttgtagaggtggggtttcaccatgttatccatggctggtcttgaactccttgactcaaacagcctgcctgcctaagcctcccaaagtgctaggattacaggtgtgaaccaccatgcctcactacagtcatgttcttagacttattcacacataagtacttatggtaaaaaaaataacataccattaatacagtgaaaaaaataatgtgttcagggcaactaagcccagtagcatcaccaaatacctatacccactgttaacagcaacaacaatggcaggctttcagtctgtatgtgcaaattatgtattctgattaaaaagttactgtacactgtattttttgtaggtgagaagaaacatcagtaatagttgagggaccagaaagtgggtcctctgaggatgaggaggcattctgctggatggccttttcaaatatttcctccagagtcatctgcctcattaacaatggtgtttgtcttagaagtctctttgattttataaactgacatcatttcttattctgttatacatgcacgctgctctagtccttcaataagctcatcacacatccactatgtcatctataggcactttttctgcagtgttaatggtatcttccttgtcactattatcacaatcattttcattgacaaccatttcagctttttcatcagcagtcaatgaatgaagaactgtagcctctttgttgatgttaaaaaaaacttcattgatgtcttccagcttactgactctgaaggtatattttttgcatatgtaaggaggtcatacatcattttttctctcatctgatatacggaatccttcaaagtcaccacgttgttcatcatcatcactgaacccaccagagcttgtgccaggtatgcacaactgtatctttagtcatgtgttctaaacattggcaacagcatatatggcatccctcatgctaaactccttttgaaaatcttctacacttatgcctctcttcactgctgctagcatgctgtttaagaaagcattatttaatcctcattgatctaaggataccttgtcacatgggtgaagtagagtagtcacattttagggaaagtacgtggcataaacattatttttgatgagaatttccactggaggatgagcaggacagatgtgaaggaataacaaattcttgcaactgtcatccagtgcaacttccctgcagtgaacacaagctcctggtaccaagtgcttatgaaactaatcagaaaagacacccctggtgatctaagcctttttattagcataatggattggtaagaaattcactccttggaaacagcaaagacacaagcttttgcctgtcatagccagattacacttatgcatgcctgctgcatcagcacatccctgcacagttgttctgtccttggcatccttaattcctgtagaggctgtctcagctctagtcagtgtctttccggggcaataacaccaaaacggtgatgttttatcagcattgcaaacttgttgtggagtcaaattttcatcagcaatgaccttggcaaattcatcaattaatttctctgctgctttgtgatcagcagatgcttcatcaccacacatctttgaaaatttgatgctgtgtcttttctaaaatttccgtaaccagccttttgattatttacagtttccttcaattttcagttcactgtgatagatctagcatgtttatggccagcataccattaaatggcatgtgttcagtgtaaggctgatggatccaccctttcaatacatgatcaagatcttcatttctagctttatacagtgttttcctccctcctccccttccttttttctctccttttcttttccctccctccctcccttccttccttccttccttccttctttctttccttcctacctatgaggtcttgctctgtcacccaggctggagtgcagtggcacaatcatagctcactgcagcctcaaactcctgggctcaagtgatactctgacctcatcctcttgagtagctaggactacaggcacacaccaccacacctggcttttgtttgttttttgtagagccatagtctcactatgttgctagtattgaactcctgggctcaagtgatcctcctgccttggcctcccaacacactgagattacaggtgtgagccaccatgcatggagtgtttactattttttaacttaacttctgttcatcattttcaggatggaacttcaacaatttatctttttgtttcttcaggtcatataaggtggtcattccaacaccatatttttctgtctggtttctccaatagcttgattttctttgctacagataaacataaacgcttcccctttttcttgtcactgttactcatagaagtatctgcaggcctttttgaaattttcaaaaatgtcagagcagagtataagcaaagagtcatagtgattaatacctgaagttcttggtgctatgtggagcatggtggagaatctgctattggtgcatccagcctgctgcacacatgccattttattaccttttgtctgtgtgtgtgcgtgggaaggggaatctggacatgtgcagaaaagatgtattgcagctgaagggggatgggagggtcttttttgccttggggacactgagtaaattgtgtgttatgtacttgtgttttgactgcgacttgtcacaggaggtcaagtgtggaatagtccccttgtggccaatgctcaaaaagttttagattttggagcatttcagatttcagattttcagattaggaatgctcaatctgtattattattattatattttacaaagagcatgggttgctttcataatcagaaggagatattttacaataaaatagttggaagaaagatatttaaaacctcaagtaattgagtaatgcacaggtattagtgttcacttatgatcatagatgagacagaaaataaactgttagtagtgtaattaacaaatggcatcatttatacaaatagttactgaatctacattagttatttgagggaatttaaatcacaggaatacatgaccataggtaacatatacaaagtgctcactctctgccaggtgctagtcttaagagctttacatggcttacctcatttaatcccctctactatcctatgaggtaattatttatacatggagaagaccaggtatagagaagatggcctacaacaatacagaacatagcagaggcttgaaaagcactcttcgattaagaattgcactcatctgttcagaattgccctaactgctgagaaccctgaaaccagtgaggaaacccaggcaagacccagtagcgggagagctgagatctggatatgtctccacataattccccaggcttgaacacttagcccccctcctatacgtccctgagtagatgtggagttctaaactgattctacagctctgaaaagaagtgtcctgattgccattaacattttgaagggggtcagtaaggccataataagcttctgaaattccttagaaacctagttcacatcccactaatttttgctctttttagcatggcatcaggaaacttctctggtccagtctttgatgatgaaggaaactttgggatgtggcagtggagttgtgttttttgggaagttgcactgtgcctacatactgtttattttggtgagctgaatgatagacttgtgatacacttcaaactatccacttccatttaaaaactggctcttcaagttctcaaaacctcttatcagactgaaactcagccaaggttaaaactgccaagtatctctctactttcctgaccccactgctcaaggactcctatttagcacactgtattatcgaacagcttttgcagagtctttgtgtggaagctgtgtgtgtgtgagataatcttttttttagcatcttttttttttctcctcaccgtaagtatgaccacagtcttcaaaaaacaaacaaacaaaaaagaagcgctgtcttcagacatgttaagaaacatgtgcttttaaaaaatgtgtacgctttatattaacttttacatacaatatgagtagaatatcacaaaggtctactgaattaaaatcaagatattaatatataccttaagtcacaattattggataggtgacatacttcataaggacaactgtttggttcacgttgcttatgtttgtgttttaaaatcataacaataaacttttgttttaaatgcacgagaatttactttccagaaattataatttatccatgattcacagcagcctccatgtcttctttaaagaagaatacaccttaaggagcatggagaaacccaaggagaggtgtatcaggtagctttgtcagtataacaagccacccccaaataacaattttctatttctcatgggtgcaaggattaaatgagataatccatgtaaaccttccacaacagtctctggcagatagtaagcacctgtgattcttctacggatctcacctggactcagtcatgcagctgtagaggtgggtcagctgggggctggcctagctctccgtgcggtcttcaccctccaggaggctagtctgagctttctcacataatggtttcagtgttcccagagcagataagccccaaggtgctagtgctgttgaagcctctgcttgctccatgtttcctcccatcctcttggtcaaagcaagtctcatggccaagggtagagaaactgattcaaagggtagagagaccgacaccacttcttgatgggacgtgctgctaagaatttgttgccatttgttgtaatcaagtatagtctgtctctgacaaaaattattcacatttcttttgcaagaaaaatatgctccctcccatcccaggattccccgaagtctcatcagattatagtattagcctcgaagtctagagacttatgcctgatctgcatgagatctagatacagttcagactcctcagagatagctcttcttatgctgatcctcttgatcccaagacaatgaacaggctgtctttcccatacacatccaacatataatgatgagataggaaaaggataacaaaagtagacaccccatttaaaaaaaaaaaagagccattaacaggatacatatgacaaccactggtccatagcagttctgtccaagcacatgttaccaggtgcccctgatcctgggctaggccatgttccttgattaggacccagctctgcttttcagaagtggtttcttggtttatattcctccactgctcttggctctaccctctgaaactcttcttttcccacaacaaatggcttatttttgctcctaaatagcttcattggcctagatcctgatcataaaaagttggggacccagaggcctcttttcctttgaaaagtctttgtatttttaggccaaggttgtgtgtgtgctttttagtaaaattctcttaaaaactttgtggatttccaaatactctaattaggctccatgcccctaaaacctatgttcataattgttttcatgttagacctctgtctacttcaggctgaggatcaggttgtttgagacaacacacttagagtcttagagctcactttgtctagctgagaaggtctgcgaggcagcttattcaattttaccgaggtctaaggccatttcttacttagaattgtttcttccagttgaagagactggagagataaaaagtttttattttcctatcttgtgagttctggtttctctctattttctctaaataatgcttgcaaactagatgattcaatttttagtttgtctctatcgtgcagaacttctatgtagttatagacacactcaaaacactttcaacattgtctggagatctttgcagcgagatgcaaaattcataccaacattttcagcctttggagctgccataggcaacagtgttgccaagtgtttggctgcctatgatatgggctgccttttcccctgactgctctcgcagtttcctcaccacttccaccctcctctgacagtctgcatgccatctttccagttttacttaacagttacatcactgcttttcacctgctatctggtgccaaagccaaggtggaatgttttaggtttctgttctggcagcatgccacttctaggtaccaatttttctgtcatttagcttatgctatgtaagaagctgctacccgttttggtggtttcaaacacaacgatttattatttctcactatcctgttgattggctgagcagtcttctgttgggctctccgcggctccttcattttcagtcttttgttaggttagctggtggttgtgctcagcctcgagtactgctcagctgggcatcatcttcctgcaggctagcccaggcttcgtcatatagtggaattaagctacccaatagcaagcccttttgcacaaatgcttttcaaacctctgcttgcatcatatttgctaatgtctcaatggtcaaagcaaatctcagtctcatagccaccctcagactcaaggagttgagaaatagtctgtacctcttgatcagagaagctgcaaagaatttgtagtaagaagatttttatttttattttatttttattttgagacagggtcacgctgtcatccaggctggagtgcagtggtgtgatcttagcttactgcaacctctgcatcccaggttcaagcgatcttccagccttagcctcccgagtagctgggactgcaggtgtgcaccaccacacccggctaatttttgtgtttttgtagagctggattttgccctgttacccaggctggtcttgaactcctgggcacaagcgatccacccgccttggcctcccaagccaggattacagatatgagtccctgtgcctggccagaaaagttttttttgcaccctttcacaaagagtatgtacaaattcaaggggaaagaatggggccacctaggaggtcagatcaagaatgtgggatgagaacagatgctcaccacgtcatggaaataatctaattggttgatgtattcatggttctgatactatctggtactacaatactaacattaggccaggcacagtggcacacatctgtaattacagcactttgggaggttgaggcagaggggatcacttgtgctccagagtttgagaccagcctgggcaacaggcaaaaccccatctctacaaaagatataaaaattagcccgcagtcccagctactcgggaggctgaggcgggtggatcacttgaggccaagagttcgagaccaacctggccaatgtaatgaaaccctgtctctactaacaatgccagacattagctgagcatggtgacacatgcctgtagtttcagctactcaggaggcttaggcattgctaaacataggaggcagaggctgcagtgagccatgattgtgccactgtactccagcctgggcaacagagcgagaccctgtgtcaaacaataataataatgataatatagtaaaattagtagttatcatttgttgaagtctcaatatatgctactctcatgaaaatgctttatacatgttagaattttattgctgtaaatggaaatggcaattacataagagtttttttccactttgctaataacattgttttttcttctgcctcatcctcccgagtagctgggactacaggtatatgccaccacgcccagctgatttttgtattttcagtagagatggggtttcaccatgttgaccaggctggtcttgaactcctgaacttaggtgatccacacacttcggcctctcaaagtgctgggattacaggcatgagccaccgcgcccagccttaataacactcttttaatcattatttgtatgtgaatacaatgagcctctctttcctcatctttacagtgaaggcactgtgcaagctagtcattacaggctttttctgctctcaccttctttgattttacttaacatggtggttgggttgattaaggaaggaacacagtaagtagctgctccttacccacctgacttccacacccgtggagaaataagaaaggaaaagcagtcagaggccaaagggtctcgttagtgaccgataaagacaaggttggaagatgtggcttacatctgtgggactgtgcattctgatcttgaagccagcattagctggatttaccctccctggccacagctgatttcacccaccccacccaggggtagtgcagagacaacacaggttctctgctaaacccacttttaggaaaaagaaagaagtggctgggctactgcagacaggttcttcttttagattcactaattagataagcaactccatgcccctttgcaggaggaggtggagagggatgccagagaagggaagaaacagagcagagaatattgctccttaacaacactagcgcctcccgacctagtacctccccacactagcgcctcccaccctaactcccccaacagcttcagtgcatgattaagtggaaagggcatgaactcaggacctggacagatgtgagtttaaatcccagacttctctcttactcactgggtgaacttaacttctccgagacccagttattagtaaatcgaaaatgatgttaccctcctcccaaggttattgtgaggattgtggtggattttatatcagttctcaagcacaatgactggtttggggtgcacacagtctgtcactgagattcgtttttccttccttgctttacggagtgggcttgattctagagggctgcagacacacgcagaaagttactattatagaatgtttgcttctcgaatgtctttgcttgccacagtctctaaagggagtgagaagactgtcagtggtgagtggagataactgaggaagggtttgctattttaactcccaggaaagagaaacattttaaatcaaatcaagctgatctttgaacacatggttgaaagatgttaataatggccatttgagtcatcaataaattgtgtctaatgccctgttttttaaaaagcaaggaagtgtgtccaggcattttagaagaggatttccaacaaagataagtagatgcctttgacatttgaagggagaaacttcagttactgtaaaggttacttacatggaaaaccctcatgcattgatgatgttggataactcagatatttccgtaccttgtgtaaaagatatcagccatatataagaatattttttctgggagaatttaacaggagtaaccaggcaatgagactagaataagtggcccaaaggacactgtttacaagaaagaggaacagataaaggaatgtaaaaattcttaactggtgttacgagttggaaaagaaaaggtcattgatgattctggaaactccatggatttctccctttcaaagatacttcatggaatagttacaaaatataaaggaattacttaaaggcatatatgttttccaactggactcaaaatctattccccatcattttttaaacatagatctttgctgtattttccaggcaaagttttgcttcacattctagggccaaagggaaatcagatgtaagagttacaacaactgttttagtttgtaaatactaatagagatacaagtggaaaaatttgcacagatgacttgagccttgaggccttgacccttgagtgctcctgtctttactttctcccttagctcatctactggctgggagcggtggctcacgcctgtaatcccagcactttgggaggctgaggcaggcggatcacaaggtcaggagtttgagaccaacctggccaatatagtgaaaccccatctctactaaaaacacacaaaaaattagccgggtgtggtggtgcacacctgtaatcccagctactcaggaggctgaggcaggagaattgcttgaacccgggaggcaaaggttgcggtgagccaagattgcaccactgcactccagcctgggtgacagagggagactccgtctcaaaaaaaagaagaaagaaagctcatctactgtcctttcctgctgtggcttctatgcacctgactgtaaaatttacatctccaagtgtctgtattctgttatttcagagagttaataattttatggattttttttaaagttgtggtgacttactccctgtttttaggactgtaacaactgaagtgttgcaatgttggggaaactctgatatgaagaaatttgtgtgggaaagaaagtagtgattctaatggtgacagtatttccatgtgttaatccagttctaagaattagatgctaataattgttcctaatagaaaagctcaattagggaatacgtttcctattagactaacgattttaaaagaagccttcttgtggggagtttaggaaaaagaagctagtgtagctttgtggattacggatggattctcaagtagtcacacttttgggatttatatctcaactccataactgtatgactttaggcaaactgcttaaactcattaggcctcaaacctgtagactggggatgatgataatacctcataaggaataaatgggttaatacctgcccattgctgagtaccgcatttggcattttacaaatgcttaataaatgttcactgtagagcagaatgtatgaaacctacacaggagtagctgctttgatttcccgtgcatttctacagaaagcatctgaaagcatattgctaaaagtgaaatcccagctacccactggctgtttatcaactgtgcatatcaaactgcctttttctcttcacacactggcagaaaattctgattgaggaaactgaaaagcgaattatgtcagagggcatcaaatgagtaaagtgattgaaaagtagaggctgtctcctccagcagtggtttgaataactcctacctgctttctgctttagagcaaagagaaaacaagagacatttaaaaattatttcttctagcctcagacttttatcgttataaaccatttcaattaatactcttcagcctttcaaattttgctttgaatgagccctaagacaatattaaatgcgttcttgcccaatgcactttaagatacgatacaagcttttttttttttaaattaacttcggagcagcaagaaaattagagctattcattaggaactttttagttttaacctgtaatgttttgatgttcaaagaatagtgtttccctctgtattagtctgttttcatgctgctgataaagacatatctgagactgggcaatttacaaaagaaagaggtttaatggacttacagttccacgtggctggggagaacttacaatcatggtgaggcaatggtgaggcatggtgaatgcaaggaggggcaagtcacatcttatgtggatggtggcagacaaaaagagaatgaagaggatgcaaaagcagaaacctctaataaaaccatcagatctcatgacacttattcactaccaccagaacagcatgggggaaaccgcccccatgattcagttatctcccaccggatccctcgcacaacgtgtgggaattatgggagtaccattcaagatgagatttgggtggggacatagagccaaaccatatcaccctcttagatgtgtcattttaaaaatcaagaaacagaacactggttttactcagttgagtgaaattattgtttatgaacctgttggggaaagtccatttgttgttctttaagggctgtgttactatggggtatgctagaaaggaactgctaaattacagtgacactctacctgtggaatttctaggtgcctctggtagcggggatgtgtgggcaggagggactggatgaggtggttgagaaaggggtacacagggtgaccccatggggctgtgcaggttgtgatctcaccacagatgagagagactggcaatccaaccatgctcagctcaccaggatgcatgcccttgggcagggctttatccacccagagaaagggccctttcctagctttcacaaagatactatataagcccaacacaaaacctcattaaggcaccctatagaccaatagtggaccttctgatttgtaataatcactttaatcatatgtttacaattggtataaaattaggacataggaggtatgtcatagaatctgaaaatcagaacttgggtactgtgcgtaagtcctgtatggagtgtatatcttggggacagggtctgttttgcttctgaaatagccgaattccatttgcaaagactctctttttctttctctttctctttctgtgtgtgtgtgtatctacaagctgatctccataataagcttcacaaggtttgctgtgtgccttgagctgctctgtattgcatattcccatgtctgaaaatttctcactacttgtaaaaatactttaacatcttgctgtgaaacaggaaaaggttttgtttcctggttttggcaaaatttgcttaatgcatatattagtcttttggggctgcctaataaagcttctcctttattatcagagagatactatgtatgtcactttaaataattcccttagaggcatgttgggaacaatgactttcacaattgttctttgtagcatccagtgtcttggttatttatgtgtgatatggtttggctgtgtccccaccaaatctcaacttgaattgtatctcccagaattcccatgtgttgtgggagggacccaggggaaggtaattgaatcctggggattggtcttccctgtgctattctcgtgatagtgaataagtctcatgagatctgatgggtttatcaggggtttctgcttttgctccttcctcattttctcttgccaccacaatgtaagaagtgcctttcacctcccactatgactctggggcctccccagccatgtggtactataagtccaattaaacctcttttcttcccagtcttgggtatgtctttatcagcagtgtgaaaatggactaatacaatgtgattgtcacctccactctttggtctgctgaggtaggtggaaacctgctttctgaattgttccttcctgatatgacagaaaattttaagattctatgtgccaaatatagtaggctattcaaagcaggatctaggtctcaatggctagaatatttaactaatagaatatcaccatccttccttgttccctgtgaatgctatcagagtatttattcatgtacctgagggtgcctcatcatagtaagctcagtcttcaattttattcatactcccatgcctgcaacaattataattttccatcataaaatgaagggatcagaataaactatttcaaacattcttgattccttttccttttgagcttcagagattgtttttatgaaagtgagttttcagctgactttcttatttagcctccataccagggagccagaaggcagtgcttatgaaagccaccatctttccagtgggggagagaggccagtagctaccccttttccttctctatcaggtttttgctcatcgagattgcccccaagctaggaattattataagttctccagaattgcatgataattatgaataaaaagctgacatgggccaggtgcagtggctcatgcctgtaatcccagaactttgggaggctgaggcaggtggatcacctgagatcaagagtttgagaccagcttggccaacatggtgaaaccccatctctactaaaaatacaaaacttagctgggcgtggtggtgcatgcctgtaattcaagctacatgggaggctgaggcaggagaatcacttgaacccgggaggcagaggttacagtgagccgagatagtaccactgcactccagcctgggcaacagagcaagaccacctcaaaaaaaaaaaaaaaaaaaaaaaaagctgacatggtaggtatctatggaatgggtcacaaatttgagtatgcattataatcacctggagatcatcctaggcctaccgaatcagaaactctaggtgcccaggcatctgtaatctttgaagctctccagaagattctgtcacctcttgcagaccgaggaccactgagctaccatcatctctttgttcctttgttttctcttacacaaaactttattgctcaatgaaaaaaggcttaagcaatacccccttccttccttattggatctggttttcagtacagattatatgcatgcctgaaaagaaaattagaaagcagaagcagatttttggtagttggttgtcaattttcttttgaattcttcacctccatgcaaattgaagcaggacttatttttagcaacttgatgaatgcaatttaccaaagtttattacattatcttttattacaataagacaggaaggtcagtggaattgtctgatttttctttctcatttaccatagttctctttctaggaactcatagtacagaatcaagctatgggatatataggttattttgattctctatttgtgcccacttctatatttttgtataacttcagtagtgtatacacttttaacctttttggagacattcttaggaatagcagtctcttcgttgactttctgttgtagttttcctaatgtttgctccctggtgaccaggagaccttctatgtcagtggagacaactcatccaaggctggctgagccaagagaggtgggcaggaaggccaggtgaaggcccccttccctcctttaccacacctcaatagagaatctttatgtctcctgtaccctttctttttctcttattagcacattatggacttgcgccttcacatgagcttgggcccttacctgatttataatttgctatctatgactttatggttgttcaatcttgagaaggaatgactgtccctggacatcttccaaaaccattttctatatgattgaattgtacttgactcttcttattgtgatgagatgatttcccccaatagctttttaatggctgtaggagagcaatacagagcacaggacctgtctaggataagcaggatacatacaaatgatccctagtgtcccagggcgtggtacagtcccttatctacccatttccttccattgaagtgccttgtaaggcttggccaacatgtaaggaaggaaggcatctctcacctattcttgccttgttcatcaaaatgcatccattccatctcatccacttgttgcatggtagactatattgggtactaacttaagcagatgggtacagctcaactctacgcaaactagctaatgtgctttccccaggtagcataaaatgttaacttgattgccatgcatagacttttaaaagttgctaaggagttagtcctttaaacgaatagtatttattgttttatgggggtttttaaattatgaaatgtgtgtggacattataaaaattttggaaaatacagaaaagcaaaaggaagcaatttaaaccatgtataattccacaactcaaagaaaactataattaacactttgatgtgtattactcaagtttctgtttcagaatgctgcacattctctttctccataactactttttatgcctaacagagtatatatgcttttcatgccattagatagccttctaaactctgtgacttatgtagaagccaggacctcattattgtgcatttaacttatttctgaatttctgcaaaaacaaggtggtgatgaaaatattttgagcaatgagtttcatacacttttgcattatatctttagaataaatgcacatatgtcaaaacaaatgcacacttgaaaagcttttgatacatattactaaactgacttccagaaagattctatcaattaccaattttttaaaataatgaatagactttgtttgcaaaatcattaagttgcaaaaacaaagacaccacaggagttttaaattagacttttttttaatctagaaaaaaaatttaatgtacttgcttagttcagcagaagctgagagaggtctcaagaccctgaacaataatactgattttattattttatcttattttatgtttttaagttccggggtacacgtgcaagatgcgcaggtttgttacagaggtaaacatgtgccatggtggtttgctgcacagatcatcccatcacctaggttttaagctcagcatgcatcagctcttttccctaatgctctcccctcccccgcacttccccgacaggccccactgtgcattattcccctccctgtgtccaggtgttctcattgttcacctcccacttataagtgagaacatgcagtgtttggttttctgttcctgcattagtttgctgaggataatggcttccagcttcatccatgtccctgcaaagaacatgatctcattcctctttatggctgtatagtacagtctaacattgatgggcatttgggttggttccgtgtctttgctattgtgaatagggctgcagtgaacattgacatgcatgtgtctttataatagaatgatttatattcctttgggtatatacccagtaatgggatcgctggctcaaatggtgtttccagttctaaatctttgaggaattgccacactgtcttccacaatggttgaactaattcacattcccaccaacagtgtaaaagcattcctatttcttcacaaccaccatcagcatctgttgtttcttgacattttaatagtcaccattctgactggcatgagatggaattaccagtatgttttgagagttcccagaatccttacccatttgaaaaagtattgtttttaaaaaattcctgctaactttatgggcaagaaaattctcagcagtttaatttgcatttccttgtttaatacagaagtcttttgtgactatatttttatacttttgctaaagattatttagtgcattggttaagtggtgctattctaacgcctgagtgttcacttactgatgaccttgagtaaattccttgatctccctatgctcacaccaactctgataatggcagtacctactcatagaatctgtatgaagactaaagagggtatcacatgaaagatgcctagaaaatatcaggcatatataacatacgtttatgttctctgtcatttacatcttctctgaattgcttcactgtctttgggtaagtagattttttggtagcttagaaatatatatattaagtatcttaacctcttgtctgtcatatattataatttctccccagttggtggtttgtctttcaattttgttcaaagtgaggaaacagttgaatatcaagaaattcagaccaggtgaaggcatagttttggtccagggtggatcttttttctgcctgtcaaccatactgctaggagaatcaccttccccatccgtgagaaggtctggtattgattatagccaccagatatcagaaatggcactttaagcagcttacattgttacattaaaaatcaccatcatagaataaaacttctgcttaatttatgtaaataatgatcatggtagatgaaaggccgtggttaatatttcaccattttccatttaccaccaaatccaacttgtcagcattccattagtggtgatataaaattaattacttcaacttgaaagaagcttttaatttgagaccaagaaccctgatagattgcgtaaccattaagtgttactacttttcccctctttgctgcaaattgtgtagtagaaaaagaatctttctcatcatgaagtcttgtgtataaacacaagatattccctatattagcatatatacatgctactaaaaatgaaagtttttcacttcactgaaaagcaatatgaacatagagactattactttgccttactaagcagaggaattaccagaaccatccttgtaaaaacatgaacattctgcttgagctgccaacttgtttcaaaaagctattaaaagtgggcaaacattgctgctacatgatgaatgaatgggagtgtgttgtagtattgctactaggccacgtatgattggaattttccacataaaagcattttaaaaagcagtgttatttacgatgcttatcattagggaatgatattgagaagaggagtaaggaaacctcaacttctaaattttacacttagatttctgtattttgttgtcattttacttcaagcatgttttacttttacaacatcttcaagagaaaaaaatttaaatcatgatttgcatggtaactgttttaagagttgttagtgtgtacaggaggggatgcttcccagtgccgaaatagacacaaaataggcaacatttagatgttggccccaaagccttgtagattatcctcaattaaaaatacttaagtttgcaagtctttcttcttcttttttctttttttttttttctgtgtctgttttaatttgcaatgattggaaaacataaagcaatgaaaagagatggtttcccaatgcaatctaaaattttcacacaccagggcctgttgtggggtggggggaggggggagggatagcattaggagatatacctaatgtaaatgatgagttaatgggtgcagcacaccaacatggcacaggtatacatatgtaacaaacctgcacgttgtgcacatgtaccctagaacttaaagtataataaaatatatataaataaataaataaataaataaaattttaaattgctcattgagttctgcgcggctatgatattgaactgcaggtgcctataggccttaaaacacaactgtttcatgttgttcagtcatcttatttctttccttgtaagcaaaatgtcagaacatttagctcctttagtgcacttattgcccacaccgaggaatacaaaattgggactgctgagtaaaatgtttaagtttcaatcccttgaaggcaaatatttgactctcaatagagaaatttaacttcattatctctacttgcaggcaaaatgaaagaccggctagcagaacttctggacttgtccaagcaatatgaccagcagttcccagacggggacgatgagtttgactcgccccacgaggacatcgtgttcgagacggaccacatcctggagtccctgtaccgagacatccgggacattcaggatgaaaaccagctgctggtggccgacgtgaagcggctgggaaagcagaacgcccgcttcctcacgtccatgcggcgcctcagcagcatcaagcgcgacaccaactccatcgccaaggccatcaaggcccggggcgaggtcatccactgcaagctgcgcgccatgaaggagctgagcgaggcggctgaggcccagcacggcccgcactcggcagtggcgcgcatttcgcgggcgcagtacaacgcgctcaccctcaccttccagcgcgccatgcacgactacaaccaggccgagatgaagcagcgcgacaactgcaagatccgcatccagcgccagctggagatcatgggcaaggaagtctcgggcgaccagatcgaggacatgttcgagcagggtaagtgggacgtgttttccgagaacttgctggccgacgtgaagggcgcgcgggccgccctcaacgagatcgagagccgccaccgcgaactgctgcgcctggagagccgcatccgcgacgtacacgagctcttcttgcagatggcggtgctggtggagaagcaggccgacaccctgaacgtcatcgagctcaacgtacaaaagacggtcgactacaccggccaggccaaggcgcaggtgcggaaggccgtgcagtacgaggagaagaacccctgccggaccctctgctgcttctgctgtccctgcctcaagtagcaggccggcccgggccgccaccgcccatcccagaccatggagcgcgctgggaaggacgcaccaaagccgggagctctgccctgcagggagttgccccaaccctttccggaactcagtctttagaaaagaaacgccaggttcaagaattgcaaaccagcctgtgcttggaaagatggttagttgataccgtccgatgattcttcagtaaagatagattcccacaaagttgtgcaatgtcattatatgacaccttgcactcttaccgtcttgacagaagccaagtaaggaactgaagttgtatctgactgtagggtgaatgtctgaggcctgcctcctaataaagactcaaggaggaagtcaattgggcatctgctaatagaatgaactcatgatggaaacttcagttcatttactttgtcctgaaaattccctggttctgttccattttgagcgaaattggccttgggaaaaaccacgttcttcctttccgattcttcatccggtctacgctatgcaattcctccccaaatatagatcttatttctgctcatttcccctacttattaaaatcacaccaaacacttactattttcttatctctttcactttttaaatatctttcaccaggttatattttggtattatttttccaaacatttttaagcactgaatatcgaacaagcactcaaattgaagtatcagtcatgttttgtgtatttttcgctgataaaaattatttaacatttatatttttacttgattacatatgcacatgtatgtaaatgtaaaatactaatattcactaatatatgtacataatgatcaattggtttaacttcttttatgtaagtatggtatataaatttcaagacgaacacttttctggctcttggtattggtttgcttgttttgagtttgtttcactccagtttgccccttcctagtccagtttgggtcaaacttcatgttaaacaactctgcattggttatggcggtagacatatggcggtagaaaatgtatacggagctagagacaactaacattcttggaaatactgcttttgttttactgtggaccattccttccatgcattgaaatggagaaattcaaagtaaaagaattctgtttttcaagcaagcttaataaacattacattatacacatatttttatacatttctggcttgaccatttagtttactttctcaattattgttaaaatttttctttttcctttttttttttttttttttgagatggagtctcactgtgttgcccaggctggagtgcagtggcaggatcttggctcattgcaacctctgtctcccaggttcgagcgattctcctgactcagcctcctgagaagttgggactctgggcgcgtgccacaatgtctggctaattttttatgtttttagtaaagacggtgtttcaccgtgttagccaggatggtcttgatctcctgacctcgtgatccgcccgcctcagcctcccatagtgctgggattacaggtgtgagccaccatgcctggccttttttccccccttttgagacagggtctccctttgtcacccaggctgaagtgcagtggcataatcatggcttactgcagccttaaactcccaggctcaagtgatcctcccacctcagcctacaaatagctgagactacagatatgtgccaccatgcccggctaatttttgtattttctgtagagacagggtttgccatgtggcccaggctggtctcaaacttgtgagcttgagcaatccgcccaccttggcctcccaaagtgctgagattacaggcctgagccactgaccctggccaaattttttttctactagctactgaggctgccacatctggatggaactgagtggagggggaaaagaatgaaaaactcaaaagaattcccatgagggtgtcttgctttctctcctgagttacaatactttagcaaaatcatgaggctttagagatatggtgtagtctgcaaacttcttaatgcccttacccacatttaccatgtttcctggccttcctctgtgtcaactcttagctcttcctaatcattatttaatacatgagtgagtttagtagtgatcatatttctcaggtcctttagaagctggaattttaaaagaattagaaggaggagtatgtgaattctttggagctcactgcctgacttgcttatgaccaggaaaatctatcccctgtatctaattttaatttcatggttaaatttgagaattgtggaaaccaagttccacaaggctattctcatatttctcccaatttctttttcagccaactccaaggatatgtatcacctttgacttaatttgctttctctaagggaaaggggaaaaaatgttcacatagctccactgcaatgttttttataatagaggagagatattgtaaatagagactgccagccagtttccacaaaaaaacgaagagttcataaatttgacatgtttgaacccataaagcattttctttgcttggaaccattataaaagtaagtgagttttcaggctctatatacattttaattcctcacgttttatattggagagttcggtacagactgtccattactgcaccaaaagaatgagtgaactgttacctatagggaaagaacacttcttcttcctgctgtttgggaaccatctcagtgtggcgtaatggttaggagtacagattccagatcctgtttcttagatttaaatcttgactctgccacatactagctgtctgactgaaccttggtttttctgtgcttcagtttcctcatctgtaaaacggagataacagtacttacctcatagagctgttgtgaaaagtgatgactgaatatgtaaaagcacctagaacagtgcctggcacatgctaagtgctttgttcattattgttgttattatgtaattttctctcagactgagagcactgttagtgacccaagtaaatttatagtttttaagtacagaggaaaaataaagcctattttttgttaacagtcttaataaataataaaatggaataaagaaaccaagaccccatcttctgtgaatattagggcttttttttttttgacagtcataaagatgttttcactatggcatttctatccctgtgtatatccaaacatgtcctgaagaagaaatgagatgttccaccaaaaacacgtaagcaggaagcagctgttctgctcagcttggcaggtgttctttcctaattcttcccaagctgtgagtcagaaagtcctggaaggagttgtaggaagttgtagaggctgggtcactgacctaagagaaggcatcatttggcccactgcacgtcctggcctattcaccaaagcccttcctggctctgactgccacaccaggcagtgggtgaaatgctggctttttccttaagaaattgtgttctagtgccaccaagagatgctgtagagctggctttaccaatctcatgatgcttgcttggcaactctgaaaggtgactttggccaagaagaccttgtggcaattctgcaaattttatacactcatatcttttagggtacaaaatgaaagaacaaatcacaaagaacaatagatccttcaggagctgaaggtaagaatcttttatagctattttaacatatacagtgactactttctactagccaaatatcaaattttacaactaccaccaagccacagattataggtggtaacaactccagaaatgtcctaactaggaaaggtgctcatctagtatgcatcggtatccaggataatatgagttagaattttaaaaatgtcagtcattcaaaaatatttgaactgtgacatcacagaagtaattttatggccttttaaggtaacaacttaaaaagagaacagtactctttttatatcaatgcctttacatttatttaaaaacagtcctaatgctttatagttaaatgtcatatgcagatatgttcaggctctaacatataaagttcctaacttgacaggaaactactgaagattgtgtacagcttaaaaaaaaaaaatagggtaactatagtcttgatttttatgtataaattctatcattctatattttaccatcagacatatttctactcctttctttgaagtatgcgaagtatctccaactgcagcatgcaactcattcatttgtaatcaagacgatagtttgaaacacccaattgtaatcagagcaacagttgacttccttttgatagcggagttgaaaatcattgcaattaataaaatggggctattagaaatggaaaacgaataggatctagaatgtaacttcatcatataaatgatgagtgtctttgttatcaacacgttattaagaatgggcaagatgtccttatatactagaagcttttgtaaagtcatgtgtctattgataataaagattttcggaactgatgttctgagtgagactacaaaggatgctttaaaacgagtgatatctggccgggcatggtggttcccacctatactcccagcactttcggaggccaaggcaggcagatcacttgaggccaagagttcgagaccagcctggccaacatggtgaaaccccttctctactgaaaatacaaaaattagctgggcatggcagtgcatgcctgtaatcccagctaccctggaggctgaagcacgaggatcacttgaaccaaggaggcagaggttgcagtgaactgagatcgcaccactgcactctagccttggcaacagagtgagaccctgtctcaaaaaacaagcaaacaacaacaataaaaccagtgatgccctgcaaaatgaggattgagagacaagtccccaacactatattttttaattcctgatgtttctttttaagttacattttatattctatttgaagcatctatagacacttcttggacctcttctatttttcttagtctatatttctatattttcatggtcctatagccaactctttagacatatccactcttctgtatctcagcatcccataatgtttgatagagggtaaaaataacagagtatacacacacacacacacacacacacacacacacacagaatctaccatcgtccccatcccctgctccttctgtctatcttaacttgcaaatggcaggatcaatcaactgccacctgcccaggtcagacaattatcctctcttgcttccattacttcagcagcttttaattggcctctggcctctagtcttatcctctccagtctaatctctgtacaatgctatagtacagccacagtgcctttttgttgttgttgtcattacgctgttgtttttaattgcagtattatatacatgacttaaacttaccatcctaaccattcttaaatatacatttcatgtattggttggttctcacattgctataaagaactatctgagactgggtagtttataaagagaaaatgtttaattgactcacagttccataggctgtacaggaggcatggccagggaggcctcaggaaacttacaatcatggcagaaggtgaagtggaagcaagtacatcttcacatggtgacaggaaagagagagagagagagagagagagagagacagagcaaagggagaagtgccacacacttttaaaccatcagatctcatgagaactcactcagtgtcacaagaacagcaagggggaaatctgctcccatgatccaatcatctcccagcagctcccttccccaacattgggaattataattcaacatgagatttgggtggggacacagagccaaactatatcagttcccatactgctaagtacactcatattgttgtgcaaccagtctccaggattcttttcatctttcaaaactgaactctatactcaataaacaaaaactgctcatccctccagcccctggcaaccaccattctgctttctatctctatgagcttgactgctctagatactgcattgaactggaataatatagtatttgtcctgtcgtgtctggcttatttcacttagcattatgtcctcaagcttcatccatgttgtagtgcgtgtcagattttaaagctcagtaatatgccatcgtatttatagagtacattttgtttagtcattcacctgtcaatggacacaggttgctcccactttttggctgctgtgaatagtgccgttcaactgcttaaaactctgtaatggctgctgattgctgttgggataaaatctcatctccttagtgaggttcttcaaggccctgaaggagccaggccccgcttactttcagcttcatccctgacacctttcattgcttgcttgctttccttccttctttctttctttctctctctttttctttctttcttttatttctttttctttctttcttttctttcttctttctctttctttcttctttctttcttttatttcttctctctctctcttttagagagagggtcttgcctaggccggagtgcagtggcacaattatagctcactgcagcctcaaattcccaggttcaagcgatcttctcacctcagcctcctgagtcgctgggaccacagacacgagacaccaccctggctacttcaaagcactgcacccacccactcagttccattgttgcgtaggagctccgtgaagtgcatatttaaggactgcatcgcccccatcttcacggtgttatgtgtgcttctgttactaaactgcttttttatttttaaggacaaccaataacatcttacttgttttgggatcttagcactttgcatagtatcttttataggcatttgggtatttgtgttctacatgcagaaatagagatattcagaatttgttttctgctatgagtgactttttgtatagctttttgaagatgcatattttacagcataaagcacggtatctagtttctcctcccggaggatctgtgtcgggtgctgagtgaggccaggatgcggttgggggcgcagtgtcctgagaaggggggtgggacttggtgaggggaggggacatgggactggagaaagactgcttgggaagaagcagatcatgcaggagaacggtcagtctgaaaaggtgagtggagagagaatgaagttctgagtcacgggcactgaagccagcagaactgggagcaaacagaggctgggattgggtgctgtgtggcagagcctggaagaaatagcttagtcaaggtacagactcaatttggatgcaaagaaagttgtaaaactacattttatctggaagtgattttctttttctttttattcttcaaagcatgtaaaacaaagttttctttttttttaattttggacaaaatgtgttggcttgagtttcagctggacatatttccatctaacatggcatccagtagggtaatttgtgcaaagtacttagctccctgctcctagtcacacagggctgtgtggcagctttcggcttcagtcctaaaacgccctcagccactgaagtcgccatggtatggtaatggtctgagatgcctcagtctgtgcctctgaatatgtcagggaatcccaccaccccccaccccacacacatccagactgcttatgaatccataatacttactcaatacaaaaatgtctaacagcctgtggattgtgcagaacagtaacagcaagggtcttcttttcctacaagcgttgaagaccaaggagagaatggaggaccctaaactgcccttgcttggagctgcaagttctctccctgctgaagctgaccctgcaggtcgactgctgcttgggcctgaagtgcctctcagccaccagcagccaactctttgaaaacatggatttgggccaggtgtggtggctcacacctgtaatcccaacactttgggaggccaaggcaggaggatcacctgagggcaggtgtttgagaccagcctggccaacatggtgaaaccccatctctactaaaaatacaaaaattagctcggtgtggtggcgcatgcctgtaatcccagctacttgagaggctgaggcaggagaatcccttgaacctgggaggtggaggttgttacagtgagccaagatcgtgccactgtcctccagcctggcctgggcaacagagtgagacactgtctcaaaaaaaaaaaaaaattaagaaaaaaaaataaacaaaaaacaaaacaaacaaaaaaacacatgattgtgaaccaaatcaagcaaagaatctccaggggggtagtgcctataaaaggaatgttacccccagataaaaacaaactatttagattctacatgacagaggaatttctcttgtgggtaggaatgtttaactaattcattccttggctctgctatgtggtttaccctggtctcatgcacccttagaagggcatagatgaggtaacatggtttcttttcataatcttcatccacgccttgtcatctggtttatggaagaaacctgtcaaacaagaaacgttacctagtggcaagatgttaggacatgcagttactaggagaaagtaaacggcctggaagatgaaagacatggccatttttttaaggctgcaactccacaggaggggtagcttctcctgttttggctccctgcattggccattatcaatatttgaagtgactttgcaagaagttctcatttccaaaaggaaaccacagctttattagaaaaacttgcatctctcttctctgataagagtgtcagtgccacattaaaaaatggcctggcagaatgcactatgggtatgggagtggcaaggagagatcctttccttcttgctaagagacaaaaaggcttaaaataaatatttttggaagaaataatccagtgatgtgaatgagtttgagttataaaatgaaaaagaagaaaggaagaaagaaggatgacctgttcctagacagaaagtaagtcagggccgggcgtggtggctgacacctgtaatcccaacactttgagaggccgagatgggtggatcttttgaggtcaggagttcgaggctagcctggccaacatagtgaaactccatctctattaaaaatacaaaaaaattagctgggcgtggtggcacatgcctgtaatcccagctactctggaggctgaggcgggagaattgcttgaacccgggaggtggaggttgcagtgagccgagatcgtgccactgcactccagcctaggcaacaagagggaaactccatctcaaaaaaataaaaataaaaataaaaaataaaaaaagtaagtcagaaagcaagaaaaacttgtgcactcagaagggcagaccaagaagagagggcatggccgagtggaccaaaacttagaaagtggaagctgaaaatacaaaacacagactctcctgtgaactagttcagtttctttacatctgtataccaacaaacagaaagagtaagtaaacaactctcttggctgatcttgtcaaaagggacaacagttacaactagaagttggtaagttgttttcattttcctctgtgcatgccctgtgagtataatttggtaaaattatatattatgatagtctatggcataatattgtttgggcttaaattcagtgtaagtgagatgaaaattttggaaatttctcctaacaactaaaggtatttacagatttctaactcaaaacctttgcattaatctgtgtgttattttatttttcctttacttctctttttttttttttttgagacggagtcttgctctgtcactcatgctggagtgcaatggcatgatctcggctcactgcaacctccacctcctgggttcaagcgattctcctgcctcagcctcctgagtaactgggattacaggcgcacgccaccaggcccagctaatttttctatttttagtagagacggggtttcaccatgtaggtcaggctggtctcaaacccctgacctcatgatctgcctgcctcaatttcccaaagtgctgggattgcagttgtgagccaccaggcttggcctcttttacttcttttgttaaaaaaaaaaaaatttaaggcctgcccattgtcagtctgataaaatacaaatgcaattcttttctttatcttcttattgtattactctttaataggtaaaactgggagagaacaatgctattaattccatttagtttattgtttatttgcttattctgcttttttattcggaagaaaaatttaagaatatattttttttccattttcaaaattgtcacaaagtcttaaaaacaaagcagatactgtgttttatacctcaaatgaaaattcagagaaatagaaacataccatgtagcaagtaagcaattgaattccttcttaaactttattgtaaaaaacaaacaaaaggaaacatccatgcattcaaatatatattagcaacttctctgatttacttgacaggagaaagaggctgggatttgccaatagcccacatactctgtgtggacttggttgacagtgctctccccctccttagctgtacctgcacactacacagcaataagtcatcaaatgtgcttaaggagagcaggaaaatttactgctacccagtgtttggtagcataaaaacacagttaccacatccattattcatggtattgggtcaaatgtgtgagcccacacaccgcagtgtgaaatggcaagggattctacccttaactctttcctatctttctaagtgatctcatctaccctgtggctttgctaccttatcctgataattgtcaaacctttgtggagagatggttgactgcttatgactctggcagccctctttagtttgactgataaggagccgacagagtgtcaacatcacccaagattcccacgtgctgttagcatgagtaggcaacgtccctgggcagatggcatccaagctagactcatcttccttcaagtgcacgactgctctcattctcaccattggtaaaagattgttttg

SEQ ID NO: 2511 - DNA, 2122 bp, Homo sapiens
ggcggcgcggagctcgggcggccgtggaggaactcagcctcggccgcaggaggcgccgggagcggagccgccgggagtcgcgcaacaggtttccttctccatcgctgcgcccacaggggacgcgcgccctgccgggagaggggcttctcggttcgcactctcgctcccagtccagcttactgactctgaaggtatattttttgcatatgtaaggaggtcatacatcattttttctctcatctgatatacggaatccttcaaagtcaccacgttgttcatcatcatcactgaacccaccagagcttgtgccaggcaaaatgaaagaccggctagcagaacttctggacttgtccaagcaatatgaccagcagttcccagacggggacgatgagtttgactcgccccacgaggacatcgtgttcgagacggaccacatcctggagtccctgtaccgagacatccgggacattcaggatgaaaaccagctgctggtggccgacgtgaagcggctgggaaagcagaacgcccgcttcctcacgtccatgcggcgcctcagcagcatcaagcgcgacaccaactccatcgccaaggccatcaaggcccggggcgaggtcatccactgcaagctgcgcgccatgaaggagctgagcgaggcggctgaggcccagcacggcccgcactcggcagtggcgcgcatttcgcgggcgcagtacaacgcgctcaccctcaccttccagcgcgccatgcacgactacaaccaggccgagatgaagcagcgcgacaactgcaagatccgcatccagcgccagctggagatcatgggcaaggaagtctcgggcgaccagatcgaggacatgttcgagcagggtaagtgggacgtgttttccgagaacttgctggccgacgtgaagggcgcgcgggccgccctcaacgagatcgagagccgccaccgcgaactgctgcgcctggagagccgcatccgcgacgtacacgagctcttcttgcagatggcggtgctggtggagaagcaggccgacaccctgaacgtcatcgagctcaacgtacaaaagacggtcgactacaccggccaggccaaggcgcaggtgcggaaggccgtgcagtacgaggagaagaacccctgccggaccctctgctgcttctgctgtccctgcctcaagtagcaggccggcccgggccgccaccgcccatcccagaccatggagcgcgctgggaaggacgcaccaaagccgggagctctgccctgcagggagttgccccaaccctttccggaactcagtctttagaaaagaaacgccaggttcaagaattgcaaaccagcctgtgcttggaaagatggttagttgataccgtccgatgattcttcagtaaagatagattcccacaaagttgtgcaatgtcattatatgacaccttgcactcttaccgtcttgacagaagccaagtaaggaactgaagttgtatctgactgtagggtgaatgtctgaggcctgcctcctaataaagactcaaggaggaagtcaattgggcatctgctaatagaatgaactcatgatggaaacttcagttcatttactttgtcctgaaaattccctggttctgttccattttgagcgaaattggccttgggaaaaaccacgttcttcctttccgattcttcatccggtctacgctatgcaattcctccccaaatatagatcttatttctgctcatttcccctacttattaaaatcacaccaaacacttactattttcttatctctttcactttttaaatatctttcaccaggttatattttggtattatttttccaaacatttttaagcactgaatatcgaacaagcactcaaattgaagtatcagtcatgttttgtgtatttttcgctgataaaaattatttaacatttatatttttacttgattacatatgcacatgtatgtaaatgtaaaatactaatattcactaatatatgtacataatgatcaattggtttaacttcttttatgtaagtatggtatataaatttcaagacgaacacttttctggctcttggtattggtttgcttgttttgagtttgtttcactccagtttgccccttcc

SEQ ID NO: 2512 - protein, 281 aa, Homo sapiens
MKDRLAELLDLSKQYDQQFPDGDDEFDSFDIVFETDHISLYRDIRDIQDENQLLVADVKRLGKQNARFLTSMRRLSSIKRDTNSIAKAIKREVIHCKLRAMKELSEAAEAQHGPHSAVARISRAQYNALTLTFQRAMHDYNQAEMKQRDNCKIRIQRQLEIMGKEVSGDQIEDMFEQGKWDVFSENLLADVKGARAALNEIESRHRELLRLESRIRDVHELFLQMAVLVEKQADTLNVIELNVQKTVDYTGQAKAQVRKAVQYEEKNPCRTLCCFCCPCLK

SEQ ID NO: 2513 - DNA, 1991 bp, Homo sapiens
ggccgcggcggcgcggagctcgggcggccgtggaggaactcagcctcggccgcaggaggcgccgggagcggagccgccgggagtcgcgcaacaggtttccttctccatcgctgcgcccacaggggacgcgcgccctgccgggagaggggcttctcggttcgcactctcgctcccagtccaggcaaaatgaaagaccggctagcagaacttctggacttgtccaagcaatatgaccagcagttcccagacggggacgatgagtttgactcgccccacgaggacatcgtgttcgagacggaccacatcctggagtccctgtaccgagacatccgggacattcaggatgaaaaccagctgctggtggccgacgtgaagcggctgggaaagcagaacgcccgcttcctcacgtccatgcggcgcctcagcagcatcaagcgcgacaccaactccatcgccaaggccatcaaggcccggggcgaggtcatccactgcaagctgcgcgccatgaaggagctgagcgaggcggctgaggcccagcacggcccgcactcggcagtggcgcgcatttcgcgggcgcagtacaacgcgctcaccctcaccttccagcgcgccatgcacgactacaaccaggccgagatgaagcagcgcgacaactgcaagatccgcatccagcgccagctggagatcatgggcaaggaagtctcgggcgaccagatcgaggacatgttcgagcagggtaagtgggacgtgttttccgagaacttgctggccgacgtgaagggcgcgcgggccgccctcaacgagatcgagagccgccaccgcgaactgctgcgcctggagagccgcatccgcgacgtacacgagctcttcttgcagatggcggtgctggtggagaagcaggccgacaccctgaacgtcatcgagctcaacgtacaaaagacggtcgactacaccggccaggccaaggcgcaggtgcggaaggccgtgcagtacgaggagaagaacccctgccggaccctctgctgcttctgctgtccctgcctcaagtagcaggccggcccgggccgccaccgcccatcccagaccatggagcgcgctgggaaggacgcaccaaagccgggagctctgccctgcagggagttgccccaaccctttccggaactcagtctttagaaaagaaacgccaggttcaagaattgcaaaccagcctgtgcttggaaagatggttagttgataccgtccgatgattcttcagtaaagatagattcccacaaagttgtgcaatgtcattatatgacaccttgcactcttaccgtcttgacagaagccaagtaaggaactgaagttgtatctgactgtagggtgaatgtctgaggcctgcctcctaataaagactcaaggaggaagtcaattgggcatctgctaatagaatgaactcatgatggaaacttcagttcatttactttgtcctgaaaattccctggttctgttccattttgagcgaaattggccttgggaaaaaccacgttcttcctttccgattcttcatccggtctacgctatgcaattcctccccaaatatagatcttatttctgctcatttcccctacttattaaaatcacaccaaacacttactattttcttatctctttcactttttaaatatctttcaccaggttatattttggtattatttttccaaacatttttaagcactgaatatcgaacaagcactcaaattgaagtatcagtcatgttttgtgtatttttcgctgataaaaattatttaacatttatatttttacttgattacatatgcacatgtatgtaaatgtaaaatactaatattcactaatatatgtacataatgatcaattggtttaacttcttttatgtaagtatggtatataaatttcaagacgaacacttttctggctcttggtattggtttgcttgttttgagtttgtttcactccagtttgccccttcc

SEQ ID NO: 2514 - protein, 281 aa, Homo sapiens; identical to SEQ ID NO: 2512

SEQ ID NO: 2515 - DNA, 67122 bp, Mus musculus
  misc_feature (1)...(67122): n = A, C, G or T/U
gtcagacagacagacagatcaatgtactgtactgggaaagagttaaaataacactgggaaatgttttttctttgagacaggatttctctgtatagacttggctgtcctggaactcactctgtagaccaggctggcctcaaagtcagtgatctgcctgcctctgcctcctgaatgtgaatgttggtattaaaggtatgggccaccatcacctgacaggaaataatttttacatatctgatattcaggattattattataagtagagtaaaggggattagtttttcttctttattttgtttttctttttcttttcttttcttttcccttctttctttctttctttctttctttctttctttctttctttctttctttctttctttttttggacatggtttctctgtgtgaccctggcagtcctaaaatttgctttatagaccagctggccttgaactcagagatctgcttgcctctgcctccctagtgctgggattcaaggcatgcaccaccaggcccagatcagtatttgtttatttatttttaataataatttatttatgcatttaaatggggtattatctatgtcaggtcatcctttaatgcaccatgtggtctaggctggctcccagctctgactcccaatctcctgtctgagaccctaagtgatcagattataagcttgcataataagagcacacatttgtagtgatgggcagggaacacatttgtagtgatgggctctgggcagtcttttatttccccagaaacccttcccaggactcccctcagaacgccattggagaaaagggtgcaaagcaagaggctgaagaaaattaatgtacttcttaattttccagttcaactccagttgcccaacatttatcgtgtgcttactacataatgaatattctttaaggtgtcagagacacaaaataattagaagcacacaactttgcttcaaggtgcctggaatccggcgtgggagtagggttttaatagctatctgtctaattgtacatattctagaaaatctcctgggtgagatggattatttcacaatactataattatgtatcccacagcatggagcaccaaccccaccgcacccaacctgactgcttttatagccaggattaccataaatagtttactccagctggcccaacctctgtccttcccaggcagaccacactatttttaacttagattggataaatcttcccattcctctctttgccaaagttccagctgtttgaacttcaatattttattaacccgtatagagcaaattcaaaaagttttacaaattttccagtttatcctgtctaactatagcaaagcctttaagcgttataacaggctatagtcactccacagcagtattatctgaaggtgtgaggttaagttctttaaacatcagtgcacggtaaagctatctacctccaaggaatgtgtgtcccgtgcagtgactacatgtaacagaaatccagatacaacaaggcacaatgatacctccatcttttttctggtgagaaacaggtcaggatttggttagtcctggcctctgttgatctcagctcaacacggctcttgatgccttcattattcctcttttctattccccatatcatagattacacccagagtcacctcatggttgtagatgattgctatatctaatgattgtgaccacaatctggctacttcattatttttctcattgatgtgatctgcttagaaggtgtttaagggaagacgttgcaggggggaacggggagtagttacattgcatctaaactaaaaatcatgaagttggcctgggctacacaacctcagagtctgaccccagtgatccactaagtccagcaagccaccttaagcttctacaaccttccaaaacagaaccaccgattctgcttcctaaactggctagtcctgaaatcccttttagcattgaaactacaaaacttggatggcctgggtagaagcctcccaaagtgctggtcaatttcctcaggctgctgaaggtggcagtgtggggctgtctctgaatcctgctggctgacagggagaagttatcagcaagagggatctccacatgctgaatcagctcctttacagtaggcatgccctagccaaccatgtctacttacaaaagggatgtttgcaaggtagtctgggaactgtagttttaaaccagtttagggtgttcttattagaaaggaataggagagtggacactgcacagacagcaatcttttcactgtaatcttaatttcaacattatttgtaagcatgtgtatgtctttacctctaaacaggcagtctgaagacagaagatactaggacagcatactttggaaggacggacttaaggcaacatatacaacagctattgtatatatacaacagttattgtatgtatacagcagttattgtatatataaagtactttttcgtggtgctgtgtcttttgaaaaactacatgcataaaccctaagtttaaatattagaccccctactaatatttttgttcaattgttttcaagacagagtctcactgtgtagctctggttgtcatggaactcactctgtagaccaagctggccttgaactcacagagatccccctgcctctgcctcctgagtgctggaattaaaagcatcatgccaccacactggcttactcattttccattgagcccttctagagagctgtttagagcatgcgactccgctcatccagtgaactctcctctctcagcttttccttctccttggaaatctcactcttaaatgagagaagaaggatttcttgggaaggacttgtttttggctccagcacgacagtacccctgagtttggtgacatcagagtgccattaacttctatcatctactttttggcagaacggtgagcaaaagcaatggggataaggctgagagcacagagcgtctaaaccaaagccaagtctcagatttctaatgtatgtaataaaggatgcagtatattcaagcactctcagcagttaaccagttaataaactcctttacgttttctgaatttttagtcatccgacttatcaatttttgtcctagaaataattgcattaagaacgagttccaaatcacatgtgctgcctacaaaagggaaattcctttagcagtgaattagtcagttcagctaagataacaaaacatcccagactgggtagcttaagaaacagacattttgtgctatggtgggattcagttcagagcgctgcagctcaacccccatgagagaagcttctattagatgcttctatagatgctatttaacatagagacccacaactggacaacgtggagacacgcaggagagacctggagcactcagtcctaagtttcatggctttatcaaacccttaccctccgggctcagggggccgtgctgaagaagaggtagggatgagtcaggggaaactttgtcatctagacacaactggactggatgcacttatgagctcagagactctgtcactgcacacacctgcgtgacttgcacaggttcaaaccagacaaactctcagcacagagaaggggaagtggacccaaagtcccaccccaggaaactatttgcaactgacacctgctgggaaagagaaagttagtttcctccagtggagtgttactgggtgtatcaaacactctccaggggaggctccaggacccggagtagttaccctacacaaaacagaattcatgttttttgtttgtttgctttgtttttccagacagggtttctctgtgtagctttagatgtcctggaactcactctatagaccaggctgatcttgaactcagaaatcctcctgcctctgccttccaagtgctggcattaaaggcgtgggccatcactgccctgccagaatccacatttttaaagcacttttttgtttgtctgtggtttttgtcttgttgttcttttagtttattttgattatccttttgaatgagaatggccatgaaattgggtggggtggagaggcaaggaagatctaggaggagttcggggaggggaaagaatatgctcaaaatgtatccaaaattaacaaaaataaaatttaattaaaaaaaaaacccaggcatttcctcctccccccccccccccatttctggtagatttccatcacagtgcctgcaagcttggtttctggtgaaaggactcctctggcttttctgtggctgcctttgcagtgtatacaagcctttccatagaaggagaagaactgacaactctgtctcttctaatagggacaccagtgctactgtatgtggactatactctcatggtattgcctagctttaattagtgccatgtaggctcatctctaaatacagtcacatggagaagttagagctttagtacacgggtttgatataggggacaggggcagaatctagtttatcacaagttaagacaatgtggcagaatgttctgtgcccagcataatcctgggttctttacatctttgttttaggaactaatcattaaatccgtgcacgataaggacgctgaaggggaacactgaccacattgtcctgatgactagtgatggatcctgcttttaaacctgaatctgcttaactacaaagcccgttcatagcaatattattttgggtaaaaatatgcccatatcacttcaagtaaatttggagccttctgggttgctaagaatgtatatgataaaaatatgggttgatatggaataatacccaagattattatagttgtttgtagtatacaattaaaaagtaataaaagaatacaaggactagtaagtaagtcttgttcaattttgacgtccaatgtttccattcttcctagagaaactgcgggcatatttccctcttttcttcactgaatcattttatgattttatttaccaggaggccacacacacatactcactcactcactcactcactttttttccccttagaaagcaactttttaaaagtttgaaacaaagtctcaggtagcccagtctggcctccaaccccctatgtagtggagaagatagtcacctagctgggctacagtcaggaggaggtgctctgtctgcttagccagactctccaagggttttatctagtactcaaactgatgttaagtcagatacagatattgatagtaaagggttattgaacaaaagctagccaaagatgacgttggcgcttgatgtgggatagtccattgctctgcaaatcctaatgttttagacagccagcggcggcctgctggctctgcaaaatagatgtgagtcttcagagaacttcctgccacacattgtattgtctggagaaagaggcaagaagaaaaatgtcactacatggttgataacataattggttcctcaaatattttccatagattggttaaatcttcaatttcagaatacatggatatataaaaggttttttttttttttgaaaattagaacccaaatttaaaggatctggcatgaaaagacttctcattatttactgtccagatatttatttaccatgtatgtgcatttttttcttaaaaatttatataaaaatatatatccttgatatttggatgaatatctaaaaaatactatttttaaaaagaaaatgaatttaggtcaagatagttttaactttgggggacattgctttatagctctcagggagcacacttttcaaccatttgctttgttaactaagattccctgacaggtcctccactgacaggaaatgttaccctgccatgacggaaacacaggctaaagcttggctaccctctgctggacttagtttgaatagaaatatcttccaagtatggtggattttccttataagaagccttaaagttataataaaaagattttttaaaaaagattagacccactatgctcatttaatagaacacaaccccaaatgtccaagtgccttttttcaaaacacagagtcttctgctactcagccatgctttctccactataaagctgtcttaatattggtcatcttacaaacatttttattcatcaaatttgctacaaagaggagacgatctatggcttgaaaaaaaggaaaaataagaaaagcaattttaattctcatagacttatgatgaattctttttaaaaaatcagaaattcgattttatagttggttggaatttctggaagcgttcagattcatggagaagcttaagaggacagagtttccttgtgagacaggaaggtaagaccattcctgggttggggtcagcttcaaagcaaaccagcaacagtgaagccggtcagacgaaatctgggggcaaattgtcttagggagatggagaaaggaaattaatttcatttttaaggttcttgaatgttttttctctgaaagctaacagagaggaataccagtctcgagagaagttggcatacagtatatgtctgcatgactctaacttttcagttaacttaacattgccaacagagttactttttaatgcatcatactttctttaaaaaaaaaattgttctcggctgagcaatgtccatgcatgcttttaatcccagcactctggaggcagaggcaggtggttctctgtgagtttgaggccaacctgatctacagagagcattccaggacagccagggatatgcagagagaataaaacaaaacaaaattgttctgtttttgaaaagtaggggccagttgctcttttactcatgagctcaaattgctctttatctaatcagaatagtagtttaatttggaattgaactttcgagtgtctgcaaacatgagcaacagaggtcttcatgttgacaccgattcaggattttgtaagccatcttgtgtcacccttgataacagcacacaggtagtgtaattgaaatgataccacatgcactggacctcaggtttacctgagtgtaaagctcctggaacaaacaggcatgcagatacctcccatgcttgtaaacttccaaggtaactcaagtattacatgtagcatactcattgcctaatacaaatgaaatatcactggaattcaaatttcaacttaaagcagtaaagctggcaataactaaaaatgagccatgtgaggaattcaggtctggtggtatcttctggttccagaaggaagatatcatatcattcccaggccttccattgcccaagtgataccctgcatgtactatcttagcaaactcagtctgagacttgggttgtagctcttggtagtgtgtttgcctagtgtgtgtgagggcatgctccctctgccttcccgacacagaatcctggattgctttggggcataccatccctttaacaggtccagtgtctgcttccattttctaagttcctgacaaagctgaacactttactctaaatgtgcttttattctttgtactgtagttagcgtatgagaatcactcagagtagcgtgtgtgtgtgtgtgtgtgtgtgtgtgtgtgtgtgtgtgctttatgtgcatttgtgtgcaggtagccatcttggtgtacacactgaggccagagaagactatcagatgtcccttctctatcactctccaccttattcccctgctacccagagctagactggtgaccagttaaataccagtgatcctcctgtcttccacccttgtaaagtttcacagggctatagctagttgaatggtagaatatttgcataggttatctgctgttattggaataatttccatattttgtccagtctgcatttagtactgctatggacagagataccaggcccctaaacagatacttacatagccataagaactctgttgtgtcattgcctgatgcaaatctaatttctaagcatttaaatctacatctgaaaatagtgtgcaaatcttccaagcttgaaaaatacttcttgtttgtttgttgttttgtttttggagacagggtttctctctgtagccctggttgtccccaggacagccactctgtagactaggctggcttcaaactcagagatctacctgcctctgtctccgaaattctgggtttaaaggcattcatttaccatgcctggcttgagcagtatttttttaagagacatttattttatgtgatgtgaacatatgtgagtacactgtccctgtgttcagacacaccagaagagtgcatcagtcctcattacagatggttgtgagccaccatgtggttgctgggaattgaactcagggcctctggaagaacagtcattgctcttacccactgagccatctctccagccccaagtaataaatgagtctacagtccccatcttgtggatctctctcccttccatagcttctccactgccagctttccatgtggctgtttgccccaaatctgcctttatctgtcttctctcattccattctcttgctaaataaaaataatttccgtggtttaaatattatctacatgcaagtaagaaggcttggctggactccattgtgctgtattcaagtactgcacacagtacacagtcaacatgcagaactggagtttattaatgctccattgtccttatttcaataaacaattcctgtgtctagataagtactatactaagagttggaaaccatttaagctttttgtcttcatttgacccttaagcgtaccctctccacacctttccataattctcaacaaaacactattacccaactatagcatcttctgcttgagttgttgctaaagtctctaactgtactccattgccaatctctagcctccagttactgttgcttgggaatgataactcactaaatgatccatatctgaaaacttgcacagatctctattatttaagctgcagcacagttccttgggcatggggtacaatacaagagttcatgttggagcatttgattttctctcaccaggtggaatctacccaaagtgctctttctctatcaggctagactgagtcctggcagctaccatcccttgcggttttaggtttcctgggttcttcacccttctcctgatcccacaatggcttccaactttttagttagagaaagtcatttgtatgaattcaccctagattatctcctttctaaaatgttccctgacaccctaccctaaaaacatctgtgtatattcatcacagcatcaatagcattttgattacacttgacagctttcaagtcttgtaatctcttgagctcaaccacgtatcccagtgggtcttttgaatgcaaaagtctagcaccaagcttggtacatgacttggtctgtgcaggttgactggtttaatgattaacaagtctctttcactcttcagtgtttggtttggcaaactgcacattcatctaccacattgcatatgcttggcaaacatttgaatgaagaaattaatgagcccaagtcttccttaattactggaatatatctgcatagtgcaactaactacataaaacctatagaccgcaaattgcacatgataatagtcctatcctttaacttcattgttgtctggattcaaattaccttgggcaacctagtactccattcgttgcccttggactcactaactgctttccgagtttgttgtggcttttatttcgtaaccatcaggaaaatgtcagaatagcaaagttttaaagttcaagcaattaataaaaacacaaggtttttatttaaaaaaaaaacatggaggttgnnnnnnnnnnnnnnnnnnnnnnnnnnnnnnnnnnnnnnnnnnnnnnnnnnnnnnnnnnnnnnnnnnnnnnnnnnnnnnnnnnnnnnnnnnnnnnnnnnnnnnnnnnnnnnnnnnnnnnnnnnnnnnnnnnnnnnnnnnnnnnnnnnnnnnnnnnnnnnnnnnnnnnnnnnnnnnnnnnnnnnnnnnnnnnnnnnnnnnnnnnnnnnnnnnnnnnnnnnnnnnnnnnnnnnnnnnnnnnnnnnnnnnnnnnnnnnnnnnnnnnnnnnnnnnnnnnnnnnnnnnnnnnnnnnnnnnnnnnnnnnntgtttccgcgctcgggccgggaggccgagtgacggcgggcgggcggaatgagcgcggcgcggacgctgcgggtgcccggccgcccacggctatgcggccgagttctctccgtacctgccgggccgcctggcctgtgccgcggcgcagcactacggcatcgcgggtgagcgcgggccgcgcctccggggcgggcgtaggacgcgccgctgagcgcgcggtgccgccgccaccgccagggggcgacagagctcggccctccctcctaggtccccctttctgcggagttggcattggagcccaggggaagtctacagctagtcctttcccttctgtaagaaggatgcacttgtcagtacttgcaaggtggagtcaacagagccaccagttcaaagccatcctcaacagagacttagggagacgctggccctttcttgaaaaagaaaaaaaaaaaaactagaaaattctgtgctcgcttttagttgttctaggggaagtggataaatgtgcagagatgtctaagtgctcaagccatttattttaacttataccccatctgctgtttatgcacaggagcagtgtatggcaaaccattgcataatgtcagtgatctgtaatacttgtttactgcaggaaaaatacgatttctgaaaagtagtggtaaataaacttgtttccgtatagtttgtccattagtgcttagtgctttcacggttgggttcacagttcttggccatcaaactttagacttttataaaggtttcttacaagaaattggtataattaggaattgttttctagagattttttgtgtgtgtgtctgagttttttgcttgtatgtatgtctgtgaaccatgcctggtgccagctaaggtcagaagagaagattcaaagagggtgttggatccattactgatggttgtcagctgccaagtgggtactgggattagaagctggctctgcacatggaaggggtcgggtctctgacctgacagttgacttttttttttcttcttcatcagttacgtttaagtggaagatctttaacactttacccacctcactgatcacaaaaactcaaagcgaaattctgtgaagactctagtttgaacagttgaatgtgcatgtgagcatagtaattagtcatcttaccttgtaaagttcaagtgcagattccctttgaacagatgttaatggagtgtgagatgggggagagaaagagacattagtctttcagcaaaaattattgattgttggcacataactgaagttaatgttgttttcaacacctgaccaacgagtatatggtatttccacatatactgtcttaaaatgctgtgattggtgtgttctgcgtgtatcagcaggggagaaccacagtcttgggggtttgtaagcacaagccttccttgtcttctgttattagctccagcttgaaaggtttgcgtgcctagcaccaggcccggtgtgagttggcactctgatgcgtttccccagactggtgttccgattccagtctggccagatggtaagttggatatttaaggactgaagcatactatgtaacttttaattgttctgtatatacggttgcagttattttatgggaaatttgtggtagttaaagctggtccacaatgtttaagatttcatcatagatgactcccaggaggttaaacaacatgacttagggctttgttttgttttgtatttcttctaggctgtggaactctattagtattggatcaaaatgaatctggacttcagatttttagaaggtaaagtgattgacatttctggtgctgtgataaggcatcaagattaaggcaacttacaaaagaaagtagttactttaggcttataatcttagtgggtcagggtcagagtctataatggtggagcaaagtcatggctacaggaacagctgagagctcacatcttgagccacagatgggaggcagagagatccactctgggaatggggcaagtcttttgaagtcccagagcctggccccagtggcacacttcttccagcaataccacatctcctaaatccttcccaaatacttgtatcacctagggactgagtattcaaacctaagagcctgtggtggccattctcctcaaaccattataatggctctaattattaagtgtacatatacagtcaacctctgtcaaagtcttaatgcagttgcattttgaatatttggaactaataggtttttaatttatgatgtaaaataaacttttacattggcatcatatagaaattatttttgctaactatgattatgccatgttctcaagcttactagtgtctgcttataaattatacatttaaaacgtaaaacagtgagcgtcttagtaatttagtttccttaagcaagagctagcgctcatcctgtggactgcccagtgtttctctctggacctgtcttccaggttgagtgatggacacacgctacttctatcaggattagtcaaaggcagaggaaagagattctgtagaaagccactacctgctcgtagctcagatgaagaaagatttgtgggagtatttgaaatgattggtctccgtattttgaaagtctcacaagtgcatgctgtgagtcacaggtgcactacaataaaagcaggtgatgtcagcatgtctttggtggatacctcatatgagtgtttggaaacctcctttcagtttaactttggagctatctacctgcccttcctgggctgtgcttccaggccactgtggagtacctgctctatttatctcttgtagttttcaagatcatctgaggtaatgtgtgttacaatatgtgaaaaacaaggaaaaaaacagtaactataaaattaagatgttaatcattttgtgatctgcagtgcatgtattttcttttctggcgtagctttgactggaatgacggcttgtttgacgttacctggagtgaaaacaatgagcatgtccttgtcacctgtagtggtgatggctcactgcagctctgggacactgccaaagccacaggccctctccaagtctataaagagcacacgcaggaggtatgatgatggcttcccttattgtttgtttgaaatctctttgggatgaacacagggaaatgctttcaggggacaaggttaagctttaatgtttcttattcatagtagatgtcacttattattctgttattcaaacataaagtacttcttagcctaagacaagacaagaaaaggtcaggcttctcattaggcaacagcagtgcctctagcaggcacggtggcatccttccctccagagggcctcagccttccttatgccctatgaacacgcctacacgcagtgcctcaggagagggtgggcgggctgttcgcaggctctctcacgattgtctgcaggcttcagtaagactcaatgtattccaacagcggcatcaagtaccaactaggaggctgagttcactaaaagaaaataaagatttagtgtttgtaaatttgtatgtgtgactgtgtgtgcgcacacgtgcacaagagtgagttcagacactcatgcaagctggaattactgggtttccccagagaactagttacaggcgtttgcgagctgcctggtgtgggtgttgggaactgctcaggtgttctgcaagagcagtatgcatgcctaactgctgagccatcactccagccccctaaagcaaatttaaacgtaaatctaaatatgacttttgtgtcatctggactctgtgtgtgtgtgtgtgtgtgtgtgtgtgtgtgtgtaatatgaggcgcaggaactagtttatattttggaaataccaaaatgcatgcatatgttttaaggaatgtgatgaagacattctttcttggttttataccttagcaatagagccttcagtgacgacttacagattgctttctagcttttacctacctttatgcctgcctcatctcaggcctttaacaagtgttcattacatggaaggtcattattgttttgtttaaaaaaaaactgagtgatgtgagtatcctagataacattgtatagttataactattttaaaaaactcaatagttctataattagttctaaaaataaaattactttattgtgttgggatggctccttgaataatatggttgtaaattaccatggttttggaaaaatcactgggcaatggaagtggggtgctgctttaatggtttcctttaagttaccttcagttgctacatcacctctaaaagtaacagtctgagccattagactcacagctatatacatttatttgtaataagcacaaggcatgggattcacagctgcatgcatttgtttgtttagtcacgagccatcagattcacagctgtatacatttatttgtttgtaatagtcaagattcctagatatgtatttgtttttaacatatgttaagtagatatgtaattaatgcatatatcattttcatatacctagtggtctctttatattctctaggaaattctgtttgcaatgtccctgatggctgacctttatgaatttttctatttctggaattagttatttgacttttagattgtactaatcatggtcagaaaaatggcttctctcgtgctcaaatctgctttctttagcaacaaattcttgtttcatacattattctctgaagctttgaatatgtgctgtgctgaagacaaactttgtcatgtgtgtactattctagattgttttcttctcaaacataaaattttaatgctggtttatttggattatatttgtgtgggggcatctgtgtgtgttgtacgtgtgcacctatgtgcttgcacctgtgtatggggcagcatgtatgttgtgtgtttgtgtgctcagaggctataggggatgcaggtttccttttctatcaggctcctccttatttctttgagacgagttgtctcaccaaactcagagctaacctagcagccaggaagctcttctggcctctcgtctctgttctggacagtgccgtactatagatgcacagtaacacttggccttttcatgaggctcctggggattagcttggactcttattctcatgctgctgcagaaagcagtcttactcactgagccatctgtctagattcctcaaaggcaactcttgataaacatctgcatcaggatgctttggctttagttaaaagtgactttgacaggtttttctgtttgattgctattgtggttgttgttattttactggtaagcttgttcatgtgaactaactgcctttcagatgtttgtctcagtgcaccctcgtgtgttgatgctgacttccgtcttattgtgggctgctattcagaggcagagtttctgtgattagtcccagggtatgtggtaatccaagaaagcccattggctgcctacaaagcagtataggctgagtagctcgtagataacagaagtctgtcccagttctagaagctgagtccaaggtcagagtgccacaggatcaggagtacacggctgtctctcgagattgggaaataggaattgtcactctgttcatttcagagaaagtggggctttgtcgttgagatggcgtctaacaaacatgggctcctggctccctcctgttgtagctattggggacttctttgggtacatatgtagtggggaaaaatgtagacttctgcctctgacattctcagttgagccctgaagaccaaataatcccgagctctacgtccacctgaaggcaatgtatccttcttcagcatcctcaactctgattgggagggacgcagctcctactcccaccagacagggtgtttcctaaacaaaccgctcagcatccaggtagtcctagtgcaggagtctcagcttcagcacccattacctttcagagcaagaagtttggtccaagccctgaagcaatgtcccgaggtgaacaaggcgtgcttcggatgcagcaccaaagattgtgggtttgtcaacctgttcattccttctcaaggctcttcatcataactgaaaactgcattccagctttacagttataagtgaaaaatatatatttagacacatttctgaatcttaaaataaatcatttaaaatactactttaatataaaatgtttggttcccttaaaggaactgagaagacattgaaaaaaaatcacatttaatttttgttttgtttcagtttttggtaattatattgagtatttttacattgatattcataagggaaattggtctaaagttctctttcattgttgggtttttgtgtggctttggtatcagcttaactgtggcttcatagaacgaattgcatagtgttccttctgtttctattttgtggaatagtttgagtagagttggtattaggtcttctttgaagatctgatagaattctgcactaaacccatctggtcctgggctttgtttggttgggagacttttaatgactgcttctatttctttaggggttatggggctgtttagagggtttatctcatcctgatttaactttggtatttggtgtctgtctagaaaattgtccatttcatccagattttccagttttgttgagcataggcttttgtagtggtatctgatgatttttttgaatttcctcagaacataaaggagaaatccaggatttagatcagttttaggctctgggattgacggtcttggtggaatcaaagaaaaaagaaaccaacttaattaacatcaaggggtggtgggtgaggtgacttgatgggtacaggtgcttgcggccaaacttaacatcaaagcaggagtcagattcttctctgtgttgtctaattggtgtctgcagaggccactgcatcttttaagccccagtcaggaagaataagacagactgcaaagtcatcaaggacaacaacaactacacaacagaaaacaaacaacaaggcccccccggggaggtggactgagaactcagatgatgtttctgcttcaggacttggcgcggcgctgtgtgactgggacaaagcagagaggctgtgaggcgggtacagagtcagcgctgtttactccagtgtctcatttccacttagctaggctactcataaacactctacatttgttctcctcactgagtagcaaggtttctccatttgcagagttactctttcccacttctttctcctgctctcctttctgtctgacactttggtcctggctagcttccagttcctgatgtagccagggatggccttgaacttctcatcctcatgcctgtgactcctgaatgctaggattgcaggtctgtctgggcatgcccagtgtatgtggtgctgggaagggcaatcatggcccagagcctcgtctgtactaggcagaggtgctctactaattgatctacgaccccagcttggaattgttttttcttcttgcagatgtgtagttttcaagtgccatgttcctattctgtcacagagaaagtgtatttatttattttatagtaataatgtgctgaatgatttatgtcttgtcttttaaatatgaattaataatataccctttgatgaataccaataaaatattaatatacaatgattaccatatatttgacattagtatgggccatttagagatacatttatacttaaaataccatgaaagatttctctaccaaaggtacttttttctttttttccatttttggtgatgctggtgatagccccagtgctctgtgcctgccagggaaacactctgctgccgagccacactcagcctctcttcttttcttttaaagggttgtaataattataggggaaaaatcagcaaatgtatttccttttgcatgttaaggtgcaatcaaccatttattttattttagagtagattactgcaggtatattttagtatactttaaaatggcaatttaaagctctttgactatgtagaaaactaccttcttgttagaaatgtgctagttacttttctttgaatttgactgccagtaggttatattatctgccaccattattaaaggagcaccatgtagtattttaaaacctgtacttgaattaagagcagtagacatgcctatgtggtagcacatactgtgcactaggcatgtatgagacttacatgttaatctccagtagtttggggtcatgcaaacaaacagaatcagatggtatgattggagcatgcattatgtgtggtacattggtgggagaggaagttgggaaacagtgtgggtcatttcccagtaggctccatgtatagtatactcctgtctaacggctaccagctacagaagcagattacattctcagttgacctgcttcaggtggtagctgttagggctagactacaacacagaaatttgaaatctccaaatttaaaatgagaaaagtatgcataatatttgttttatcgcaatgttctcaaactttgtgaacattagcattatctaagatgcattcaccttttttcatgcttaggttacaatgtctcgggtctggggcaagttttcaaggttattttagagtactagatgactccagtgtgtaaaattgtttggaaaaccattgctttaacttcataagtctccgcagtgaaaagggtttacgggtttcctacagtaagagcaagagtcctttctaatcactgggcttgaggatcattgtctctttgtgttcgtgcgggttaagtgaaaattcagagcaagtgtctatttgactatttctgtttaagtagatcacctcacaaaagggcactactttagggcagataacacaggctctttgggagtcggtttctgttataaaatatatctgctcaaactggttttgatgaagtacagctttgccaaagtggcacaaaatattgtcaatgttttttttatttgtttttctctctcttatttttccaattacttttatttagtgccaagaataatttcatctataggaccctgcttttgaaactagccaggtattgcatgatgtttctttgtatttaattagacagttttcagtgttcattcttccagtggtcatggagggggaaactggaaacggagaagaaacactggaaatggtcagcacacaaagatcaagatgtgtctttcacccagcttgttatgcattccaaaagcctcccttagctctgctgagagtgagcttctgtgcttggcccagctgggaaaacgagcaggtctgcagtgtatcctgggttcttgattgctctagggagagaggccacggcaagggctgagtggacacagtgctgccggtgagcagacccttgactgggacggggcagggtgagcatgcttgattctgagggagagtatgaatgcagaactaggcagaaaagatagcagcagtgtgagaggtgaagcaaagtgccaggaaggcaaggacagaggaagcatggcttgaccacttagcatttgccccttgagatctgtaggaaggcattgctaacttgtatggttggaaatttttatacatatatgtaagatgtaaaaatggtacattggacacttgaatatttaccatgtggcttaagaaataaggcattacttatgctctggagtccctgattacctctttataatccgtccatctccctttcatccttccttcttgctagaagtaaccactttcttcagctttctgtttacactttctttgcttacatatgtatgtgctctgctcctaaggcatgcatagttttgcatgattttgacctttgggcaatacaaatcaccacagatgagactcatataatgccaagtgaagctgaaaagctgcaggagccacataatgttgaaaggctttgaacaaggcagtggcattaatctgtatttacaaatatgctcttattcaagctggatagaggccatattgcataaaaacaagcaggggtggatggggagggtggtcagagagttgttgtactcttaagtcgtagctaatggttgatggcagtagtctgagaggaatcacagcaaactttaggcatggccctttaagatgtttcttctcttaattcttggctcttggtgttcctgggtggagggtaagcttgtcccttgcttcaagtctttccttgctctttcttcccaaagactaacagtgtataatgctcaggtctctgatggcatgtttccccctgaattgtattgagaagtaactggctgcccttgttatgtcttgtatttctgctttacttcttcaatgtttttatgtttatgtatttatagttgccttcttctaaagggtaaggtccgtgagggctggtcttgtctaccgttgcaaacatctcaccttcctgctcatgctactaatactaagttactaagtaacactagtgtctgttgacagtggagtgaattgacttgaggctggttccatggagcccaggtttctcttttcatctgtgttcccaagcatctctcagactgtataaactgttcttagaacttgaggtaattgcacgtttgtcctagatactctgaatgtgtaatgtgtcatagtatcttccttcttccaggcttctacctttaaaatactgccctcactcaccgttcccccaaatctttcagtgttccctaatccctgggtactgaatcttccttttatagttttttctccctgtgagcatcttgctatgcaccccaacctgatacatctgcctctaactcttgagtacagggctcacaggcacgtgctaccacacccagcctcgtctgtgtttctggtggatctctgtcactgatttacttctgcttcttaagcccacaaacattctggccagcctcaagtcctgcaggagcatggtcttccatcatagcaatctttttgttcttaagtctgttttaaacttcagcttagtttaactttttgcttatgtgggtgtgagcatgtgtgtgtgtcagactgagagtgtacatggacttagagccagaggacaatctctgatgtcagtcaagggctgttaacctcacttttcttgttggcttgttttgttctcttcctgcttggacatgggcagtgggagggcaggactgggatggagtgtgaagcactggggatattcttttaatacagtctgtttgttgggaatttgagatttagtctcatatgtagccttgactgaccttgaaatcactctgttcaccaagttggcttcctgcctctgcctccccagtgctgggtatagacgtgtgacatcacgctgagcataaccaacatcttaagaaatagaaatgtaaaaacatccttgagttacaaaacataaaatctttcacttatttacttgtttttaataatttatacccaccaatttcataaaagtataggtaacaaatgaacaattatatttaacatctaaacagtggttgtagggtttaccatagtccactgagtacgcacttagtattgatcccacataaagttgattaactctagcatcacttaatataggtaccatcttgtgtgtgtgtgtggagagcacacttaagatcaacttccttagcatctttcaagcatacgtgattattaacctcatatctctagaatgtattgattttataactaaaagtttgtaccatttggccagagtcacttctgccttcaccctctcggcctgtgctgaccactgttctaagtttgacttttttggatttcatgtctgtcttggtcactcactgttctcttactgtgaaaagacaccatcacttatgcaactcttataaaagaaaggtttttcattggggctggtttacagtttcagaggtttagtccatcgccatcatggtgggaagcatggcagcacgcaaggagacactggattaatagctatgagctacgtctagggcctgtgggccaagatactgcgcctagcccaccctcagggatatacttcttccaacaaggccacagttcctaatcaaacagttccattccctggtagataagcattcaaatagatgagcctgtggcggccattcttattcaaaccaccataatgtcttatgtgacaaaacatcaaaagtttactaaagtgcagatcagtattaatgatgtttcccctgaaacttcttcaaagcaaacccaaacacttaacatttcctacacatatgtaggagctaaagttttaagactcaaagtagcctgctggctaatgatactcagtaatcagcccaggtgtatgtctgggctgctctcacagaggatcattagacacaagtgtcactggacacacgctatggtagggatgtgtacataacttactctatacagtggtagaataacagtgtgtaagctctcagtcggcttcttgcactggtgctgagatggaggagtgtgccccggaatagcactgctgtgtagccaaagctgcctgccaagaggtcggatggagcagcactgttttctataaactgttcttctaaggaaggccaggcagggagagtaattgaattttattactttctgatgaacaccgagggagcaagcttttcaagatgactgtcttgtctgctttgacttttctttgtggtgctataagtagtaatcagttggtagatttaaaagtatgtataatttggcatggtgaaggacatttggaaactgtagacttgtattaaggcagaatggagtcagtctctagggagttagcatgggagaatggacaggctcacctttctgcttttcagacatcatgtagaaatggacactgtgtcatgttttcgtagagtgagttagttgctagccgttgacactgttataaagagctaagacgtaatatttgtcttggtgctgtttgcttcctaaacatgaagacttgacttttttaggtgtatagtgttgattggagccaaaccagaggtgaacaacttgttgtgtctggctcatgggatcaaactgtcaaagtggtatgtagtattactgcgcttacacccagtttccttacacactgccgttggagtgtttcctacaatgttctgtagctttacatgtgatcaattagttttctcttcaaaagtatttattaaaatgtttatcagaatttaaaaaactattcttgactacaacccaataattatcttattttgtgccttaaatactaccttattttatgtaaaaataaaccttaaaaatctttacatatatgtcctatatgtatatataaatgtatatggtattcatgaggtatatatgtattacatatagtgctacatggtatatacaaaagtgtttctgtttacctttgttgactaattgatctcatttgttttcagtgggatccaactgttggaaattctctgtgtacctttaggggccatgagagtgtcatttacagcacaatctggtctcctcacatccctggttgtttcgcttcagcctcaggtaagtaagttttgagttctcagaagcctgacttactagtgaagggtggcctacttctttaccagtaggtggcgccgtcaactctcgattcagagaaaatgggagtgcatacccattttgtgctcttaggggatttaattttttctttccttttttttcccccccccaatgctggaggttgagcccagagtctgtgctctgccactgaactagagtcacagcccttaggatctttctttctttctttccctgcctgtcagcctgatggcaaacattttcagaggactgagtcccagattgtgttttagtagatagaaccctttttaacaataaatgttagggttgtttttcttcttcttcttcttcttcttcttcttcttcttcttcttcttcttcttcttcttctcttttttttgtatggacagattttttttatttataatgtcataacataattaaaaatacattttaagaaggagggtttgttttttttgtttgtttgttttttttgttttttttttggttcttcgagacagggtttctctgtgcagccctggctgtcctggaactcactctgtagaccagactggcctcgaactcagaactccacctgcctctgcctcccaagtgctgggactaaaggtgtgcaccaccatgcccggtggtttgttttattatttttgttttgttccataacactagataacctatgaggcacacgtgggcttttcaatgagtaggctgagtttggagctgagacccatgacttggtgaatatagttgtgtccttggctcagggttggttaactaagagcgtttccattaaccagagtacccggggaaggcagcagagagcacaggtggaaacactccagccctcagagccacacgactcacagacaggttttgtgagtaatgtttagttggcacacagcccaatcaactcagttacgcatcatctgtggctgcctttattcagtcctaacaaaattaagtagttgttacaaaaacctaatagctctccaggccaaaatacttacttctggcctttcatgggaaatgtttgttgatcctgagaattctggagcgagacaaagaattaggtgttcagaggaggaggcagtagctagggaagaggcagtgagtttctagccatcgtccccttatttaacaatccagcggaagacaggctgcgactttctcagtacattgtatcagtgtcctgaacagctgaatcatatgaaatgggtcacaggagtaaaattcagagatcctttgctagtttcttatatttttaactctaaaacttaagaactatttattcatttcccctaaattcttttcttttttttttttttcctgagacagggtttctctgtgtagtcctggctgtcctggaactcactctgtagaccaggctggcctcgaactcagaattccgcctgcctctgcctcccgagtgctgggattaaaggtgtgcgccaccatgcccagcccccctaaattcttgaattgttgtttgacgacaactttttacctttaggtaactgtacacaaagtccatttagattatgtaatttttgagattctgatagtaatggtaatatctatgtgtgaagatatcattaattcaagaaatgcttttttccttgataaaaattaccagtattcttttctgaaatgaagaccactatgctctgtcagcttatcacagtatctgtaaaattatctctataattccttggctttaattctatctttcatgaaagtctgtgattggaattaaatcttttccaaaccatcatttcttttgtaatgagttagtaatacattattttctggctctgttttcttctccttttttcagttctaggattgatcatggcagcacacctactaggcaagtaacctgccactaagctgggtccccagcttctcttctttttcttttgttaaaagacagggtctcatctaatcccagctggccctccaactcctgatcctctttgcaatgccaggtcttatgtggtgctgaggatcaagtccagggtttcctgcttgctggacaatgctggcctatggagggacacgctcagatcttcagtttccttctgcatacctgagtgtggtttacatcctcctgtggcacagctgctcataaggcttggtgtgtgtaccaagtaaacagcggcaataataatgcacttaatgtggaattaaaatgtaaagccatgcatatagcttgatttcgtcatccttaatccttctaaggtaatgtaaatgttacaggtttcatgctttctgtaaaacaatctgagctgactgcagttcattaccattaacatagagggagttaaagctcttgtcaggaaggaagttggattgaaatctgcatggtttccccctgaagaggggcctcccgtggccttacattctgtggtttcatagggatggtttcaaacctgaatgcattagtgacacagactcaaaatgagctgaaacctgcctcccttccactgaagctggtaatttaacttgtgacttttaaaataggaattaaatgtaacaatcataggttttaatacatgaaaaatgtcaagaagtaaaacttgtgagtttttaaaaattctttttttaattctttttaccttgccattagatgttaatttgtttattgtaattacttgaagttttaattgtgtgtgtgtgtgtgagagagagagagagagcgagagaaagctctctaaggatgttatttttgtgtggtttgtgatggttatattaacaaagaattcatgtttataaactatgtggcacagggaggaagaatatttgcactatttatataaagaggattcatacgaagtaagctttcttttgaaccacgaaaactaaattattgttattgcagactccatataattgcataaattatggccaggcctgaatgtgtgggttccagctggttgttagataagcttcattctactttaaggaaaagtcatattacatctgacaggcatctggtgtttcaataaattaatttatttggggtccaaagtactctttttttttttttgctccgttcacatcataccacacttttagactgtttgcagcctctcccaacgtccccacacttcctgccatgttacagtactgccccttctcctgggtctgctgtcagtgttggtctgcaacttgaagggtgctgggaattcaggttgcctgtggcactaccttaacatcctcatacgtgcctggatgacactgtctggagataccatttttaaaagtcaaccaaagaaaaacccagcatctgtcccagtggctggaagaggtgggcatgccattgcaccatttggctagaaggcccctttcttacccagaagcacagtgatgaggacagagtgctaaccctgaacaacagtgctgtcggtcaaggaagtagagccctcccatctacagggaagtcttttaactgcagagaggtttcctaaagaccatggcttttaaaaggaagtgcacctgagtgtgatggtacagggtcagatcctgtgactgggaaatttatacagaggagccatttttacagcctgtgtcgttttcgtcttttatacatctttgaaaattgtgtaaaattagcctgcaacttgatacttttcatagcacatctttgtaagcagcactggtatcaagaaatagaattgcaccagaggacccttgctttttgtaaggcactgctcctgtcctcctgccaccagggtgaccatatttgccttttaatgacaaatactgcttagtgtacactaatgcctcctttccctgtgctaaaataagtcacttcatctactctgtactcattgtaatgtgttagtgcttgaaatctgtttacacatgcagatgaggtaattatccagggaacacaagcccataggacttgagacagtcttattcatggcatagtgactgtatggtttccaacttaggtgttagaaagtttggagaagctagcaagcatcacttggcatttcatatgactcagtaaaaccctcgtgctgaaccaaatgttccctctgggacttgactctctttagaggcagaaagctagggagaataccatttcttctctccacagtgctgtgtttcttttcctgcgagtgacagaactatcgctattctaagtctttgtgaaagctgcagagagcatacttcagaatgggaagtgatgctcagaccaggttttgtggtgatcttatccctgctttgtaatttcactctgcagctcagctctctgtatgtggtgagatgcttggttaccaggggcttccagatggtatgcttggtaaactctgttttaagagagaggatcctaaaaaacttgtaaaataatattgcatgtttgtggtcagaccaaagagggcagcagggctggctgttttttctttatcctatagggtttttgtctgtttgggttggttttgttttaagcaaaacaactgagcgttcacttttggctgagagctaaggttggagtgcttctagagttgtaagtcagttaagagttgtttggtatggaagggatatgctgttcttggaagaagggtatgggtataggccagacactagactaccgtaggcaccaaatgctcagaggccacaagagattgtttcatcctggctgttgaagattctgaaacaaattctactggatggtgattatttttagggccattgaagatagctctctcatgtaccagaattattcccatttggtacatttaaatttattcttttatccctaccattcttagatccccaaatattacttgctttcatctactaatgtgactgttcatttaaacaatgccaatcttatttgaataatgtaaaatataatctttatacttttttctttattgtgagagtgtttctctgtatagtcctggccatcctggaacactctctgtagaccaggctggcctcaaactcagagatctgcctgcctctgcctcccagggcagattaaaggcgtgtgccaccaccatccagctgttctctaaaattttgagcttgtttttcaaaggagaaaagtttcctccaactgtcccattaaaatgtagtaaatataaaaaccgtaaggaagagctggaggcatggctcggtggtacaacgtgtgtttctcatgcttgaggccccagctctctcttcagcaccagtgcagacaacaaacagatcctctgaaggctgaaaacatctccattttggcatctcatcattgagttttcctctttgatgtaaaaccactattatggttttcctctctgttgctcatcactgtgagtagttcttaggcattgtgatggtttgagaatatgtcgaggtgagtatcctgatggtgacgtatctccccttggctcgccaccagcctgctcttgcacagagcacccagtaggatgtggggttgaccaagtctgtctcttctatcaggagatcagactctgaggatctgggatgtgaagaccacaggagtacggattgtgattccagcacatcagacggaaatcctgagctgtgactggtgtaaatacaatgaggtacaggggttccgtagagagcactcttcccagtgttaacacccccttatctgtcctgttgatgagcactttgatgttgtttctggacccttaggttaaactccgtctctgtaacttgttgtgagtaagggactgacctgcgttagtattagttggacctaagtgctcctaaaacaggcaaagaaaggaacagatattctttgtttgtttgtttgttttggtttttcgacacagggtttctctgtgtagccttggctgtcctggaactcactttgtagaccaggctggcctagaactcagaaatccgcctgcctctgcctcccgagtgctgggattaaaggcgtgtgccaccacgcccggcaggaacagatattcttacaagttcaacagtgcagccttccttgtttgttttgggaaactgctttacaatttttgtaatttgtatatgtgtgattgctcttaacctcactgttgaactgtttataacccagtttttaatttgacagtccattagttttaagaattttgttttatctttctttttaagctgaactaattttcatgcttgtataagatggtggtgcccatgtgaaactttttgtaatgcttcagttaaaacatctgagtgtgagaattaaaagcaggaattcaggaataaattgattgtattaatatactatctgtatgcctcaacaggccttgtagctgaaaactgaaaatacctaccttgtttttgctttcccagctttaaactcacttgtgacaattaaaagaataccacattgtcagaactcttttagtaaaaagaaagacaatatgcatattcaatagaaatatttaggcttagaaaaccgaacaaaacttaactaacactctgctttttcaactatgagtcaccttgaaaggggttcccccacccatgaacatatgagtgcctgtaagcatgcatatgtgagtgcatacatgtatgtgtgtgtgtgtgtgtttatgtgtgtgtgtgtgtttcctgcatatcggactcaaatgtgtttatactcgctaggcaagcactctcttactgagctacattctcagcccagcaaccacagcctgcctttaatatctggtacgacctcagtatgttttaaactgtttaaaaagaaggatcagctgatttgtccaatatcttttaacctcttatgtgtgcgtagtatttgaaaaggtaagttagaaaatctacaatgctgtttgagacttgctttgtcccttgtgtgtagtgttctatcatacactttaaacatagttcctgtcctctgtagttatatagttttgattttgctacgaaatggctattttggttcctttctatgattattatgcaattaaaaaatagatcctgggtgtatatttaattacaaaaatgtattttttagtttctagtttctagtgagagattgcaaacatctcatagttttgttttgtttttttctgaattgttttcagaacttggtggtgacaggtgcggttgactgtagtttgagaggctgggacttaaggaatgtgcgacagcctgtgtttgaacttctcggtcacacatatgctatcaggagggtgaaagtaagtctttctcttttctatacagagtgaaaacgtaaccagtagtcggtgaagtttgtacaaagtgtttagggatgcagttttacagagctgggggggagcctgggccgtgctcatcctaggccaatgccctgccacggagctccaccctccgctctgggtttcctgagacaaggtctcgttctgtaggtcaggcgactttaaaattatattcctcctgcctcagcctcccaagtgccggcattgttgattgttgtgtgtgtttttgtcatccaattaaggatgatattggaagctaaaattaggttatatatttgagtaagctggaatgatataaaaattcactacttgatgttaactaaaaataactttcttaccttattacccagctgactatttcttttaacagtatttctaagtgtgttagtttatatttagggaatatgtttcacaattgcccatttgatgagagtgtgtgaatggagaggtagtaatttttttctctagcatgacagtgtatataaaagttaaaactatgcaggatgtagaaacgattcggtgtgtgaacagaaggagagcaaaccttttaacagtgcctctagtaggtgtgcctgcatagtgagggaagttagtttatctccccagcttcctgtcaggtgattctgctgtggtgctgtgaaaacctccccactcagtggcatctcctgattatcagttctctacattaacagctacaaagtactttactgctgtttccaatatgatagttgtgcaatatcccgattttacatatttcaaatagcattaaattaatatttagattgtattactcaatgtaattttaaatatgtagtacatagtagatttaactttgacttctttgggaattccatacatgcatacagagtatttgctcatacctactcttccccaactccaccaggaccctggcacatacatccctcctagcttcgtgtcctcgctctgtctctgtctctctctgtctctctgtctctctcatccactgagcccagttagagctgcttcgtgcacatggatgtacaagcacccactggagtctgggcattccaccagggaaaaccgtctccccctcctgtgtagccattaactgccagtagctttcagttagagatgggccttaggagccctcatccatttgtgctcctgtgtgctctgtcctgacctggggcagatcttctgaaggcagccacagctgtgagagttcacgaggacagcagctgtcttgtgctgaggacagacagtgtctcacagcagtcctccccctccagttcccacagtcctccatctcctcctgtgttccctgagctttgtagaagggcctgagccatccttagttatggattcttctcactccagttgtcggcttttgtgataactaccatctactacaaaaataaaaataagcttttctatgtgttttgtttgtttgtttgtttgttttgttgggtttttgttttgttttgttggttttttttgtttttgttttgtttttgttttttttcaagacagggtttctctatgtagccctggctgtccttaaactcactttgtagaccaggctggcctcgaactcagaaatccacctgcctctgcctcccaagtgctgggattaaaggcgtgcgccaccaccgcccggcctgtgtttttaataatggtcttacagggacaggtttcagtggtagacagagtttttctgtatttcagattttttgtggggacaaattaaggtaatatagtaaaaaaaatactttgcacgctgtgtgaagtgctattcaggtacagttacagggatgggaaggtgactcagctgtagattgcttgcttagcatagaggcctgggtgtgacccccattagcacataactgggtggtccatgtctgtaatcccagcacttggaatgagaagcaggaggatgagtgttcagatgaccctcagcaaggttgaggctggcctaggcttcatgagaccctccatcaaatgtagaaagcatgttagaaattatctctgtgaagcttgcgggatttctttggagaatgtaaaaataaaagatctttctataaatgtctatttgaaaggtcagcataagtgtgtaaggcctaggaaggtgcagttgtgataagtggttgtgtttctggggtgacgtggagtggcagtccgtgactgtctgacttctctctcctgcagttttcaccgttccacgcctccgtgctggcctcctgctcctatgacttcactgtaaggtacagagacctctctaatacatcctgtgtgcaacacttagtagtgtttgtatgtgtgcaacttcgctgagacctgagggattgctttactaacagtacccacttttcctgccttttattcttctctcctcctaacaagtaagtctggaagccacaccctcttgtccttcgtgcttgacgtctgtccttgcttgtgtggggacactaagtgttgcactcacattgcctgattgcattaactactcagagctcctccccctttcttcttagtcagagtttgttctgacaaaatttctgctgcttttttcataatgttttcttctgacagagcagatttgaagtgatagcttaagaagagatacccgtctctaacttgcttttctggagtgagcctgtgtaaggatgcagacaaattggggagtcaactcacagaacagccaggctgtggtgtggtgtggtgtggtgtggtgtggtgtggtgtggtgtggtgtggtgtgggggtgttttgtttcctcttgtgggtcttgcctggtgcactgtacctgggagctccatgtgcagctgagggtgaccctggacttctgatgctaaaactcttagctcctgaggctggggttggagtcctgcgccactatacccagccacattttgacagggacggggggggggggggggtggacacgacttattgcttgcctgccctccacccagccatctccaggctggagctgcggagctgtaggttatctgctgggtgttagagttttgtgtgtggatcttcaagtccatcagtttactggtgatcaagcgtgcaagagtgagttcactaagtggagatgaactgtgtgaagagagctgagcaggacactgcgttcatagacttaatgttggcaggcagatggtgcacgccaccaaaagcaggggaaagaccccagagcagcgcgttccagaagctgccggggaaggatgggtgctgagcaggtgcagaggagacccagtcctctctgtgcactcttgtcactgtgactcgggacacttccagatgaggagctgtggcttccaaagttctcagtgtctgaaactgatcacctttaccaactgaggttgcatgctgagaccttgttactctccattattctgaaactgaggatatgtgatattttagtatgtaaaatgttgtatttacatatgtgtccctcatatctaacaggagctgcaagttgtacttgtatagtagatcatagttgagtaagtcataaaaattctaaacctagtatatagcctcatattatggactatctgttatttgttttggtgccttaaaatttgttattacatttattcatttatacgagtgtggaggatatgtgtgtagaggttataagctgcttggagttcctaggaagaccaagaggtcaaactcaggtcaggtcatccggcttggcagcacgagcctttacttgctgagccatctcagcagccctgtattgttgttaattatttaataaagcttgagtagaaacttcaggttttattaaaaatatggttgaactccctttagtgactaagcactatgtttcataaagatgggccttgactttcgctggttctgcttgagacttttattattatgtgaaagcagtgtgtcttcaacagaaactgtaatttgcatcttttcctgggctagcagtatgatctaatactctctttaaaaacttaattaaaaaatttaattttagtagcaattattttttgctttaattaaaattttcttaaaatataattacattattttctttcttccttttcccttttcttccctcaaacctttcccttttttttttttttttttttttttttttttttttttttgcttttcaagacagggtttctctctgtagctctggctgtcctggaactcactctgtagaccaggctggccttgaactcagaaatccacctgcctctgcctcctaagtgctgtgtgctggattaaaggtgtgcgccaccaccgcccggctcctcagacctttcctatgtcaccttctcactccctctcaaaattgttggcctctttttctttgattattattgttttatatatacatgtgtgtgtgtaacactatacatatatgcacatatacacatatatgtaacagtacacgatatatacatatagcctgctgaatctatttagtatgtcttgtgaatatataagtttagggctgaccactttcccaatcttctctttcaatgttggtcagcaggagaaatccagagcactgtgaccctgtaatgtccaggagaagcatagattcagtagtgtgttgtacagctgtggtgttatgtggattcagagtgataaacacatttgtgggatggttgagacaggctttccctgtgtagccctggctatcctggaactcgatctgtagaccaggctggcttcaaactcacagagctctgtccacccctcccttctgagtgctggaattaaagtcatatgccactacctcccagtgataaatacaatttaacttacagtattttcaacttgtaatgggtttgccaggatacatctctttacattgattctttctagatttcacccaagataatactaagtctaaagtgtttgataatagggctgttggaatggctcagcaggtaaagcctccaccacgcccaatggcctgagttctatctctagtccctagatggtagaatgagagccgactcctgtaagttgtcctttgacgtcttcatacaagccatccccaacaaataaataaatgcaatccaggtgaaaactgttccacagtgcattcttgtgtgctgcgaatgttagcatcacaggtctcagcatattcccttcgcctttcaccctctctgctaggctggttctttatcctgccaagccatgcgtgtggtgctaacaatgtgtagagcgtgctttgagttttaagtgcttgctttttgtttcataccaagtacatcaggcatttcattaataaaatgagcaaattaagtatgtggtacgtaacaacctaaaaaaaagccgtccaataatgacttttattagaaagattaatatgctctcttttatgtggtagcaaatatatttcaagtagttcaaatagaattttcatagttgataaagctaaaatgatcatgttagcctcagttaacacctcagattcttgatattttcatagatattctaaccttcataatatttttatatgtggcctttggtagtaacaactcagccgatagcttatttttttaagatatgtattttggcaagaaaaatatggtaagaatataacgctattgatatcaaactgtgtgcattcatgttctacatggagtctctcttgacctaccagtgtcaatgtttcaagtccattcagttacaaaatgatatagatgtcatgaatggttcacattgtgtctaccccagtcaggaagctgagacaggactggggcaaagaaaccataaggcctggcctagcaactctcttgctccagtgaggtcctacttcaagggccaccctgtgctggggtccaagtgttcaaacataggagcctacagaggacagttacattcagaccatggcaggaaatgataaaaaggaagactggagaatagaagcaggcttaagcctttcagttttgttggtatagcgagagatatgcagtcatcaacacagatagagagtaattgaagacatactcataaaatcattagggtcagcagatactcggatgccctcatagtggagccgggtgtatattactactaggcatataaacttgagcaagttacctgaaaactgtgtggctcgtattctacatttgtaaagtggagatgatggaacaacaacacgagattgttgtgatgacccagtgagatgctgacacactaagtgctaagtgtcctgttattgtcagccttaaaggcagaattagcagtaaccaattcaggcagaaaacaatgtgtctttggacataagggccgtttcatcagatctaatcttctaggatggagtagtctcttttattttaaagcaagaaaaacaatcagcctacacttggccttttgttgctctcttccccttggcgttgggagagaagtaaaaccagggactagtcctgctcttcacatcacttcccctttagagaagcttggggacgttctctgggctgaacatctctgaatgcaatgaataagtggacctttagtcagttgactaggggtgcaggactgccccttccaccttccagccatggatgaatggaaagggtgacacctttgcaggaatgtttagaggttcaatgaagtagccccccagatgttcttggcacatagttagtgtctaaaaaatagcagatgttctaaaatagatgctaatagtaataagtttcctattttaaaatataagttcctcaggaagacttgaagtattaatcatccatgctttacctatcattacattaataagataattatattgctcaaagccactgaggagccgtgtgagtaggaacttttattgccctgtgaaggtgaggtggaagtgagcttagtgatgtatatagtacagcaggagccagaacagggtcgccatgtggcaatggatatgtgcagcatgctaaggtccagagctaagtggccatgcctgtgtttcatagtttgtacttagtaatacttattgcatatttaatatttatttggtatatttaaacgatatactcagttatttaatcgagttatatttaatctcttatgccatacatctccttcagccttcatttcctccatattttttatgacatttaaatgtaattaaatagaagccgttcacatcatgtctggcacatataagatattcagtaaattttagttttctttttaaaattttgtacttacattgtattgttttacaataaattatatccagtgtttatgattaaaatttataaagcctagtaaaatcacagacaatgcaaaatgtctaaaatttatttttaaatgatttagcaaaagtattacacatacatgtatgtaaagagaggacgctaagaaaatattgtaaatttttaatagttgtgaactagaagaaggatatatggtatttaaattatttcagtctttgaatttttgcatggattgataatttcaaaataaaaaatttcatgaaatagtaaaatatttactcatgctaaatacactaaagtgtttcttactaatgccttttaatagtgtgacttgatatttaatttggagtaagataagaatcagttattttattgcaaagtaggaggctgatttttaattggattttgctaacttagaatctggacaaaatggattcccaataaaataccttcattactgtcccgttccccatgggatctgcctgcctagtgtcagctctgctgaggcggatgcgcttctgatcgctgtgcttgttagcagagagtcccacaggcagattcttcttcttctttcccttcccctaaaaaaaggtcagccaaagtaaacagatagtagagctggctgtgtactttgtctctccagccgttcattcccactatacctagccccttacccatcgaaagctcagggaaagagacaagaagcatggctgagctgcagccctgtagcatctcaccactgcctgtgagatagtgtctaattcctccacagctttcttcctgtgcctagactagtggtatgatgttaatggttaaccttctcaaggactgcagccgaattaatacaatgatcaaagatgcatctaaatgctacatctttgaaatgtattaaacatttctgtcagccaagcatattttgtatgttgctgcagttggatgatatctctgatattaggagggtatctcaatgtagttgcctttggctttttttaaaaaagaaggatatttgttcccttgtttatttaattctttcaaggacacttagttttaaatgcattttgtgttaacagagcacattgtttgattccaggatagaattgtattttttattgtttatctctagttactgggatctgctacataaatgtttacaaatgtaagtaaacttaaattagacagcaaattatgacaactttggttatcctaatgataaaagctcaaaaacgtgatctcactgtagttatgtttgaagtaggccttaacagaactgaatttaatgcatcctgtttgaatgagaaactgtttctaaagagaaattgctgttttgcagggagtagagtggcctgaaagccttggggaagttgtactggggaccccatcagtgtgtggctcacatggaggtgttttcagtttgtcctacagttacaaaataacatgtaaatgctataaattgttaattatttcccagatgacatgtgtaaatcctgtatcagttattgctgtattggagagatcttttcatgaaatgaactataactttgtaagttaaatgccacgttaaaaaaatcaaaataatttcctataaaatgagagaacattcattaaagaagaacttgtgagaccttttgattttaaatacctgatttttgagtacagaacattttcagaattctttagtgaaacagttttctttttaattttatttttgttggcttttcaagacagggtttctctgtgtagctctgactgtcctggaactcactctgtagaccaggctggcctcaaactcagaaatccacctgcctctgcctcccaagtgctgggattaaaggcgtgcgccaccactgcccagcgaaacagttttctttaaggatcaacccaagtgcacgtgtagtccgcagcctgacacgagcgtaagattagatggaaagggggaaggggtgagccttggcttagtgcagtgtgaagctgctttgaattgtgctgattagttccagggcaaacgttatggattttgacagataatttgcggttttaagagttctgttctatagtctcagtaaggcaatgaaataagctttgttgtgtgggtttctgttttcttaaggctatgtcactttgcctttgctctgtagtagagtatagctcatctgaaaatgagaccaggctcagtaaactctgagttaatatctaggacagcggggtatagtcagaagcaacagtgagaaggcctgagggtgactgcccaggaaccaggcttcggagagctgccctggacgctgggccagggaccgcatctgtgcagtagggaccgcatctgtgcattgcacttttcaagagtacggaggtagctaagcagaaagccttggtctttcctcctgctcgctgtttgcacaagagtgaggctgtttacttagatcaactgggttctgtgagtcagctggtcatagtttaatatgctcccaaagcccagaagcaaacagttcacgcttgaggtctgtcctgaaactccagttagagtgtggcttcagtttagtggaatggactatacagagtataaaccatatgatttaccttacattcagcagattcttgtctttctgttatttaggcttgtgtgcgcctgcatgtgcatgtgtgtgtaaaccagaaaccctttgcaggtagtggaaaggggaggtgtttctcgggtctgagggaggagctgaggtccttcactctgagtacctgctgctgcggcttccagcccctcttgggggcggctttcctttcttttcttcatacttccatgtcctgtcacaagaaaagaaacagcattgttggtctgctttttctgtgtttctctcttcatctctgtctggctcctcatgtctcctctcttattctctgtctggctcctggctcctccctatctctgtgcccagtgcctgctgagtagggagttacggtaagaaaagagagcggctgtaagctatacagacagtctaccaccgtgcggccctggtggatgaatccatagctgtgcggcttcacagcgggagcattaagtatttcatgtggtgtagctaaggaacagtcagcccagctgggcagtggctgtgagtctaatgattcttactgtttggacgtgatgctcttgctagagagtatcatctgctgcctgttgttctgcaaaactctccctagctctgagtcccactttcccaggggagttaacagtcaaatgtgctgttcttgtgacattactgatcaagatactgatattgatactatttcataagtgggcccatgacttcatcttgagtcttagtgtcggatttttaagcagtcaacttcttttgttaccacagggatgtccagtttcttgaaatttacttgaaaaataaaatttttccaattttatttctctttactaaaatatttaagannnnnnnnnnnnnnnnnnnntacacaatgagctttatgggaacgttttctttactcctcctgttgagatgtggcattctttatccatcatcctgcatgcctgtggaccgcagccatgagcactcccagagccagcctcccatcagcctaatggctttctttaattcatcatgtactctaggcttgatgcttgctgtaatgaatgggagcttgcctcttgaaaatattgatctgattaaggttttaattgaaatattataattaattcattttgacagagaagctaagtctagaatttttataatgtttcaccttgaacattgtaagcatggtatgacttctggatatttgtggctgtttaaaagtcatctttgaaaactgctgaatagttttccaaaattaaccattaatttatttaaacttaatttttgttacagttattagctccagaatcaaaaccaaacaaaaaaaccaaatagcttcccgttggtgccgatcatcgagcatttagatgctgataagtatggataacttttacctcgttgtaaaattgtttcctaggctatgatttttatctctaagctcccctaaaagtggtaagaatcaaatagtgggcccatgacttcatcatgagtctcagtgttggattttatgtgccattaaacaatcgagttcttttgtaaccacaggcatgtctagtttcttgaaagtcattgcagaagatgtgtttggtgacagtaggaggtgagcacttgagttcatgccagctagcaagagacagtgcagcggctgagagcgagcatgaactgagtgcttacaaagatactaaacgaaggaggaagtttctgaactctgttatggacgtttacatttatgctggctcatcatttccttagggtgttggttttaaatgcaagttgtttgcctaatggagttttggcatgggctttagcatatggaattttctatgttccagaaggtagggggctgagttggtgcaggcctgtgttaagcttcagagtattcatcaaaactacccagagaatcctagatggtgcctctgcatgatctcctgagctcccctgattgagtaaagaggtagattagaccattaggtatggtatcgaggatttcgagattgtccctagcttagtccctaagctgagaaatgaacttatacatctgtatgtaccttgaaatttgggtgatgatcaaaagcagatgtataaaagcaggtgtgtgtgtgtgtgtgtgtgtgtgtgtgtctgtctgtctgtttgtcttgagacagggtctctcagtggaacctggttctctggattaggttagactggctgccattgagcctcctgactttgtcaccaccatatcatgtctggctatttacatgggtcctgggagtggcactcgggtcctcgtgcttgtacggcaaacgcattactgattaagctatctccccagaccctcacacaaaagcaccatccatggtgctacctgagtaaccttgctgaagataaagtgagactcaggcttggatcatcttaattttttttattactgggaagaaggagctaacattgtatttcattgcgttctattaataatgtagaagaaaacagccttgtaggcaaagataattcacatgaaataatagcgtgttactttacctctgggactttatctctaacgtatttgttcctccccagagtcttgatggagtcaaaagagtgtgaataagttctcatttgtagcggtcttggggcagtgattcccacagtaccatcctgggacagccacctaaccagcacttaagacttgtttcttccaaaacttcttgggcaattccagagcctttcaatttgtttgtacttagtcctccaggtgattctgatgtgagtttaagtttgaaaactaaaaatcagtgatgcagttgctgggtcatgccttcctctacagtggggactcagtcattgactttgtttatttatttgcttgtttgtttgtttgttttgagacagggtttctctgtgtagccctggctgtcctggaactcactctgtagaccaggctggcctggaactcagaaatccacctgcccccccacccccccccacccccagtgctgggattaaaggtgtgctccaccacggctatttttttttttttaacatttcttctcagttgatttcagtgtagccagggttaagaatcactttgttggctttttctttctgcctgaaagtgctcttggtctgagggtagatttatcaattctgtgtctgttgaagtatacttaagaagcactgcgtttacatggtggctcctaaacttaattcactgggcaccaacatttcctaaggtcagcttttccaggatggcgctgagttggaattttcaggcacaggtggggctgagtccatgcccgttacttgggtctctctgtgtgcgtctggcttctgttatctggcatgtgctcagtgtgttcatttgtttttcatccacccctggcatcctttggggactgtggagcagacaccgtttctcagtgctagggattgaacccacagcctttcacatgccactttagtgctctcaccaagtagtgtccagcctgtgtcagacacttttatacatgcaaaaggtacaaagactaagaccttgtccctcagttgaaggagctcagaggctacgagaggatgctaggtctgtaaattaatccacagacccagaaacatggctcattctgaatttctctgttccatgaaccatcccacttattctactaaaatctatctctaatccatggcttcttccatcacctctctctccaaatgagcactgcacagtgatttcactgtcagcctaggctacaagagacagtccgactgtcggtggcttctcatacagcaccttccttgtccctgaatctgaaagaagtgacatttgttttttctctttattctagagacttgaccattagcagcacaagtggagtagattatggtggtgccatgtatttaaaaccgtgaaacacagctatacctaacgcacatacaacacacagaaagtagccaaagcaggcccttgtcttttccggtggcagcagagtcagaaagagttgatagccagctcataggctgcagttagtcaagggaaggataagttctaagagtgctttaaaagttgtgctagactcacctcttgcctaaacttcacaagtgttactatagatatttcagattacatctcagtgaaacaaactagctcctgcttaattcttaaaatcattttgatattctatttaataatgctttatacttgctttgttaaaggacagtggagtcagaaggcaaaaagtaacttgtaatataatctccaatttaaatgaaaaatgctccacggttctgtcatattgtaatcactggagtcttgtcctgtatttacttcccatcagagagcttaaatagtgggtgattttatcagccaagagacaaaaaggctccaagtagtgtatatgctgcaccaaaacaaacattgcactggaaacactgcgccttatctgcccagctaatggtgtctctgggcgactcctaccagaagagaacagcccctgttctgtgccgagtccagaagaggcttgcaaggaaagagcaggctgctcacttcagtaaggagccctagagaaacacactctgccgctcctagctcttgtcggtggcgctcctaactctcgttggggcgctcatagctcttgttggggcgctcctagctcttgtcggtggcgctcctagctctcgttggggcgctcatagctcttgttggggcgctcatagctcttgtcggtggcgctcctagctcttgtcggtggcgctcctagctctcgttggggcgctcatagctcttgttggggcgctcatagctctcgttggttgactggagttgagtgtatccattctggaagtgcacatgctggagcacccacatggctgctattacaagtatttttttctcttatgaaaactacttaaaatttgaagataatcatagtctgctggcatactgcctagtttgttttttttagatataccacatttaatgatattttaaaaatacattttagtgtaccaaaaataaatttaaattgcagtattagtgtgtgtgtgtgtgtgtgtgtgtgtttgtgtatatatatatatgtatctacacatagatacatacatatctatatatgcatatgtgcatgtgtgtgtgtgtgtgtataagcgtgtgcatattttttaactttcttggctcttgttttccttgagaaaattgaagcttcagaggtagggtgtagcatagcatactgttatcccagcacttaggagtttaagaccagccttaggctggagagatggctcagcagttaagagcactgagttcaattcccagcaaccacatggtggctcacaaccatctataaaggggtctgatgccctcttctggtgtgtctgaagacagttatagtgtactcatatccaaaaaataaataataattcattaaaaaaaagaccagccttagatgcatattcaactcaaggctaccctgagctacataagactgtcccaaaaaactgaagggaaacaaaaacgtggcagagagaagaaaggagaagcacagctctccctccacggttggccacggttggccacggttggccactgtcctgttgctgttctgaattacagcctctcttcattttcacctcagggcttctcatgtgtgcttctgagatactttggtaatgacagcttgttttggcgttttactttgaggcttttagtttttaaaattataggaacttttaacgtgaattttgtttgaggtcttttttttttcttttaataaactcacacaaatacttgattgatactcctgaagtttggtggctctgactgggtttggagctccgaggcctgcaggcccatttggttgcatactgagcacatccgaccgacggattcctaaagtctttcagcctcctcgtgcttgcagccctgtctcaggcctttgcagtacacgacgcctactcttgttctcaggcattaccttaagtggctcatgacagcaataacagaattgtattcctgggtcctgtagttcattattctctctgaagacttgtaagaagtttaccctttatataaagatgacttagcttacccactatcgaaataaacctaactccacagtgaaatcaaagagccgagtacccgggttatccagctgaccactaaagatcctctgggggatgccattgactgacaagtggcagccggtggcacatctctgtgtattcaagaggtctcaataacattttcattatataaaggatatctagtctataatttctcaaaccgagagtttcctcccgagtgagcagtggcctgatgatgtgtttctttcccggtggccgctcgaaagcttagcgtcttcaagcttcttcctgtcaagcgcatacagacgacttcatggggatgcattgttatttattaatctccttgaccggtccgacttactctcctacctttagctttcccttaattcatttttgtcatactaaatgcatattttaaaaaccattatgaatggttagaacattttgaatacatatgcaaaatcatctgattattgtctcaaaaaatgcaaattagtgtcttactagtttttagaaacaaaactgtacaattacaagtttacttataacatttgcttacataaacatcattaagattcagaaaatttgatctttgtacaattcactgtctaggaacaagtatgcaaaaacaagaaaactaccattagcatttctgaggtctgtggcttgtaccctcaatttattttgaaaagacacattttcaaaagcaaaatcctctccctaaatattctgtagctctcagtaatcagataaatgagctatttgtttagtatctctctgctacccacacaggagattatccatagcaacagtccttttcaaaacttaataaggccagcactgtgtttattagggaaataataccaccaggttaaacaaaccgtgcctgttggttttgtgtgtttgctctctttcagagagaccagcccagcctccagcatgctccacactgtacatcgttaggaaagctgagctatgagacgattcctagggagctggtgtgtttatagtgtgtttagaataaataaaaagacgctaagcagacaaagctttagaaagctcaagtactaatttctacattgaaaatagagaaaaaatttctgaacaacagaaatcagagctgtattatggtaaatattgtcattctcagtttataaaggagaagtagaatataaaatagtggcttggctctggaaatgacgctcattgggaatctctaagagaggctaggcctgaaaagaaggtttcagaatttacagtgatattcacaagagaacagattcactttaaagaatttgaattgctgttgaaatgtaaattaaacctaagtgcttttcatattacttgttaagaaatgaaatagaatttaaaaatcacaagatgttaagagttcatctaatccaatattcttgttttccagacatgattgctttgagaaacacctaggaacggaaggaaacactgtttctcatcccaaatgaccttcagagtttaacaagtttttttctaaacaaaaatgttctaaacttccattttataagctatcaaaatgagaacacagtaatttttaaaaacttggcagattagtaatgctgttttgttctttgagttatcagaatggggtatatactttccttaatagatgttttatgcaaatcaacagtgggacgggcattgtgagtcagttgcgctgctgtgataagatcttttcaatgccatatatctacttgctagtagaagggttttagcaactgtattttctttttctccctctccctttttattgtcacagattctggaatttttcaaagcctgatccgcttctggaaacagtggagcatcacacagagtttacttgtggcttagacctgagtctccagagccccactcaggtaatggatgcagtttctacacgcacagctctgacatgggccctgcggccggcccgtagggtgtgcactcagctcacctgacgtctctgcctgtgagtgagtgtgagagggcaggggacagaggaggaagagagtggctcagcttccctcaggagggctctcctgtgtgtcactgatgatctgggcaataaatgaggggagggagggaaggtttgacttctctaacaggaaacggaactttcctccaaatgtcctgtctaaagtgctgaagactttggattctccctgaggccgggggggggaaatgcttgcctcacaatcatgtagacctggagtttagtccccagaacccannnnnnnnnnnnnnnnnnnnnnnnnnnnnnnnnnnnnnncttggcagctcgggagcctgcagtcctctcagcacagggcatccacagctgacagactgtctctgtctcctcatccccacaccccggcccaatgggaggcctcacacagagaacaaagcaggagaaaagttctctttcagtcaataaactaatatttcctcttctgtcctcttgagaacttgagatattttttcagagttcattaaaaggctgttttagtgctacaaattgtaaagtcagaccagaaataacctcacaagctcatatgttaagtggtaaggtgcttgaccacacgtgggcattctaggctgattaaagactttcgcttctgtgctaaattttagaggttaaaaagaaaaaactcccatttttcactcttatatccacaaccacacagccttattttactttacgaacttaacaacacaattctttttaaaatagttccaataagcttttgaatattcatgttatcagcaaaataattgttttaaactcgcttaataacctattaaaaaagaaaatgaaagagaattgtctttagtgtaaatataatgtgccttaaataatctagttccttcctgaaaagccttggttattgatagttgaggagaaggctgttgtatttacttgctattataccagtgagacatggcagtacaaaaggatcagacacaaatgtgcattgagaatccactgatacatagttttattacctgttctctgtagatgccttccagaactgtgaaaccacccgtagctcctctctgtccttgcttctggtagttcttcatgccagcctgaaaaatatccactgtttcctagatctcctacagtccagagttattaaaactgaccaatcagaggtttattaatcaactagaacatacatccttaaacaattagagattttattgcaaggcatctatttgtctgtagcttggcaattgatgtgtgtcaataacatttggttaaccaaatttcatgtatactaaggaagtgtagttgttgttgagagcgtctaagagtgaagaagcagggatctttaccttgtaatccataattcagatgtgccagacaggagactgtagcaataggattacttcctctcatatgtcccttcaacatacattttcatatgcagaaccttgtggaggtactgactagagacatttgaggaggactacaaataaacatgtctcctgccattataaagaagttagtctgttaaatcagaccattgggcgactgtgataagtctgggaagggtatataattagaatagatatttgacttaagagatgcagaggaactgaggcttatctcagatcttgttgagtgagcagatattgaggatatgaagagtcaactggcaatgataacattttgccacagaccctgggatcagggagcagctaacacaagagaatgaaaaaaatgcatctcttcctgccttacagtattagtttttaaatgctagaatttaaaaatttgtatgggcttacttaccatatttttaaaatgctgaatgtgagataatttatgtgttcagattgttaaaacaaaataccacaggctaggtagctttatttttgctagaccagaagtcctagctaaaggatcaaggtcagtttctggtgaaggctctcttgctgacttgatggccaccttgtgaaggacattaagaaagtcattgtggctggagcctagagaacaagatggaaaatgatgggatgcaagaagagttgggaattgtatgggggcatacagaccacactggatttgttaaaagaacagaaatgggtaaattttgatttgtctttgaaagacaattctggtagctgtaggctaatagactctaggtaaagtgaaagctaggatgccagcttgtaatctcttgaaattacctagaggaaaagaatattggtgagctgggactttcctatggttctccctaaacctttgaagatagaacagtggcggtcactaatgacaaagggcagagggtcaaggtgccctgcccttggagggcaggagggcaggggtctgagcttgggagcttggagaagaccaggcagtatgaaatagaacagttaagaggtttgtttgagaggctgggagatgacccactgaaccaagcattttccatcaacgaataagggcctgagttcagattcctagaccccaagggcagccacaagtactagtgtgtatctgtaatcccaacactctgacagcaaggtgggaggcagagacagtggagtctacagaagctcttgggacagctaacctggcctctgcaacaatgtgtatctcaacagtgagactctgctcaaccacagtagaaggggaagactaatacctgaaactgtcctccgacctccatgtgtacctacagtcatatatccacacatatgccatgttcatgtgcacgcatatacacaggttttttttaaaaagattaatgtttgagacatctcattttcggtatttaaatggggtatctggtagacagataaggcttgttcgtaggggatagttaataagcaaatagacaccattgtaaaaaaaaaatcattcttctgactatttattatctgaaggtaattgtaacaaaaccaactctccagcatttacttgcttttaatgtgcctttaactggaatgggctagaccatttacatagttgttgatagtattggtcttacaggtttttacatgcaagagcaaataataaatataaatgtataaaacctttaagacatttagaaaaaggggtagttgaccaaaaattttaagggaggatgaaatagttatctcactgtaatagccaatataagactgaaagcgcctcctctgtagtaaggacgtgtcagaggacgcccacccttacagtttctgtttagaatatttttggaagtcttagccagaggaattaatcaggaaagagaaatgaaaagccctggggatggaaagacagctcagcagttatgacgagcgtgggatgcctttgcagaggctctgcagtgggtcccactgatggcccagagccacccatagctccagttccagggaaccaatcctcttttaaccttcaaacacccagtcttcatgtgacacacggcatacactcagacagaacactcaaacgcgtaaaataagtatagtgtctaaactgaaaaggaaaagaaaattccctctcttcccagatcatttgctcttgtatgtaaaaacccgtaagaccaatcctatcaacaactgtgctgtaaatggtctagcccatgccagttaagggcccataaaagcaagtgaatgctggagagttggttttgattaagacttttgaactattagactattattgaagaaatgatattccaacactgagtcctaagacccacttacattctgtcttttctttcatgttcttgccatactctttgctgtaaatttatgctttttttcttccattttatttatatattgttttacacagtaacctttcttttctttaaagctaggatgatgatctcaaccaatatttttccttttgtcgcatatgtaactttagtagagttagaacacatttggttttcttcctccaagttcagctgtggttcaaactagggcctaacaaatgcggaactgtgggtctccctgctctgggttctatagtcctgcgagtgtgttctgtgaaaacacagaaggcagatcagctttacttagggtgattcaaggcttataaagttttgggggactaagggtaggaacatccaggttgggcaaaggtcattggcttgggagcttagggtacctagaatgcctcattagcatggggaagtacttcaggaatctcaggtactggctgaacaagagaaaggaaattgatcctgtaatctaattgaggctataggtgggcttaggattctccagacaaaatcagaaggaaaagcccttctgatgaagggagtctcccttattgctctgagcccagaggctatcccatcagttttcccacactgaacaagcactccctccccctctctctccctctcctcttcctctcttaacggttctcttttagtacttaaactactccacagtttagtggcctcaaccagtttgctctctgctcacagggttgtgagtcagcaacctgagcctatcatttctttgtgttgtctcacttggggccctcacatggttcctgacagttggcagcttaaatagagcgtggtgacctgtctgtcgtgatcttattcacatttgtctggttgccatctagaccatgagtcctttggagaagctcagcttcatccagccattgtatgcttctaagacagcaagtgcagaagatgcgaaggatcatgggactaaccttggaagtcacattcaactctgttctggggcttgagctttaaggagctggaaagagtttgtagttaagtaaagtttgccatgctctccattgttgatggctttgatggctaaagttagttttgatgtcctttaattatccttcttatgacgtgtggccactgattacaagccagtgaagttttaccctttattcacattttattctcttagaaaacacctctccctcgcagtatctttcatacccactcaaaaatgtcttttttttttttttaaccttgtgatcttaacaggaccttgctgatgttatctgtgaattgagtatttatagtcttcattcttcttaatgtctctattcttaaagatctgagaaaataggtccaaaggcgttcttacaccacctttcttcttgacagtgttaagatctctttaaaggtttaaaacctgacaaataaaacgtctgcagtcactctttaaggataattgctgagaagagctcttcgtcttcccttgttaactagcttaccgacctgcacttaagacatttttttctttgatattttcctctctgatcatgattcatacagtccttgcgttttctttcttcctttatccttattatgtctgaatggggagcccttattctgttgtgaggtctgtggtacttggcctgtaatatgaccgcttatataactggaattctctttatatattaatttatctttagaactccttgttctctgtagcattagtcctgatcttttgcatgctcactgactcttagttcacagagtgtaagccaagtgcagatctgtgtgtgtttctctacacattgcttccacagttctttctttgggaacatgggcattattcatttcagtttatcatctctacatatctaataaacattaactgttttctcatgatgtaattccactagttacatttgaaagatatgtggtctctctagaaagcactactatataattaatggactattagtcattagaaaaagatttaaactttgaatttgagtataagctttctaatttaaaaaatggcacatttacctcacaagcataagatgtagaattcagccctccaaaccaataagaatccgagttaaaaacatcatccaggtgtttgtgacacacacctgtaacatcagcacgccagagcagagaagcaggaggtttgctgcccatatgagtccagtcaggattacagcctgagaccctgtctcaaagtcaaagaatgaaaaccatacttcaccctgtgaaaaaggtggagtcatcctttacaaaagggttgcacgttgaacttggagaccccgtctctcgcatgaatgtagtagacaaggatcagatgtcaccataaattgtcacttagtagctttcctgctttgcccaccaggatctgctgctggccacgctaggctctgcagtctgtgatctggtcagctttactgtcttccagtaaacaccccagtttgtacaccttgaggcagcttacgttctagccggtggctgtgtcctgagtaaggtgggagagtgggaagcagtagcacacatctgtcctcttggaccagcctccctgctttaaaacccagtaacccttcacctggctggagctaaggagctgtggatgctaagtcgtctgtgggaactggcaagttctcgtctcttccgtggtaaactgggctggataggtggctccagcgtttgattaaatatcctgcttaacacaagatagagctaccttggaggaacctctgttaagaaggtgcctcaggcagattgcctgtttgctagtctgtaggacatctttttgattaatgatagatgtgacagggctcagcccactgtgggtagtgttaccccttctcaggtggtcctgggtggcataagaaagctaagccacagggagcaagccagtcagcagcatttctctatggtctctgtttcagttccttccctcaggttcctgtcttttagttcctgccctgacttcccttcatgctggactacaaactataagctaaaatacaccctttgctccctgaaattgcttttggtcagtgttttatcacagtcatagaatgcaggacaatacaccagctaatcttagtccccatccccagccagggagctgggcccgagtcctgccctgctttttgctggtatcccttcagctgttctgttacgagtgctatgatgttaggtgttcctgctcttttgaacagtctagttttcatcgtcctgccacttcttgttcactatctcctgtggaggcagcgtctcaccttacccaaaagtctctgtctttcactggttgcagataaccttcccagtctttccatctattatttaaaggccaccatgctaatctttcttttgtcattaaatgtgttaccaagttctttcttactatccttctggaaagttattcaccagtattcacaattttcctcttaagttataacttctaacttacgattttctcttaaggaataacttcaccttggggttatgtagtttccactttcagtatagtcttcaagctgaatccataacaccattagtactgaatatgtcctctggttttaatatttatttattatttattaattaactaatatatcttaatgtatatagatggtttgcctgcatgcatgtctgtgtaccacatgtgtgcgtagggcccacagaggtcagaagaggatgtctgaccacttaagtttcagatggcgctgcactgttgtagggtgctgggaattgagcctgggtccaccagaagagtagccagtgttgttaactgataagtggttgctctatcccctgttctctgatgttttagttttgaactctattggacacatttgtttcattcctatctttgggtctgtgtagaatgttacctagtagttggcacacagaagtgctaaaatattcaccaatgtcattgatttcaagcactctatctgtggtgacattgttatggatatgccatggctatatttacctagttttgattaaaaaacaacaaaaaaaagctatagctctgtgaagttttggtgctagcccatgggatatgctagggtgtgttccagactaacctcaggtgagccattttgtggtttgaagagctataccttgtgcatccactgacacccagcttataccttctgcctgtatccaggtctctccaagtattatggccacgtgctcttctttgctccctccctatgtctttactgtcaggaacatgttaaactgtctgttgagcaagtagcctctttctcaggctcgcacagcttttcagcactgtctcagaaggcaagagcttttgtacctctccagcgagggaggaaatgtgcgggcacttccagtcaggtagaagcagtccccaaaatgtatctttaagagaaaaaatagctttcaatcagaaacacagccctgtgtgttgtatttaaaattatgctttcttgtggacaatttacatgccagtgatcaaagcttgcatctgctgctagctttgaattttgtgttctgcatgtttttctgactctgtttgtgttttgtaggtagcagactgttcctgggatgaaaccataaagatctatgaccctgtttgtctcacggttcctggttaagacacgctgctctagtcagaaagagatactgactggcagactgcttacttagctagcatcagagcactaactactgaaagggaaaaattaggcctttacatgtactgagatttcacaattctcaaacttacattttgaggcatctgataaagacattgtgtcatattgtagtcctggtacataaactatgttttctggaatcctaaagaataattgttgttataatatatcttgtaatgtctattaaaatgttatctctatattgtaaaatgacataaaatatgggaggttagtagattacatggacagtaatatattttgttattaatttgtcattttggatgtacaatataaccactcctgttgataaaaatcaaaataaaccacatttcttgatcatatatcatttatgacatgtcaatgaggttgcctttttagaatgtactgtttgtatggatatgattttatatttaatgtagctgcagctgatggtcaaaaatgaatgctagcagagatgtaagttacttggaagtcccctattgagtgccacatttgcctgcatatatgctcagtggcattctctcaggattgctgagctgttagctggacagtgctgggagctgagtttgttttgaatgccttatatccacatctttttaggtactggacccaggacttctctctgttagctaagcatggtttcacacatttataatgccaggccttgggaagcagaggcaggaggattgcaagtcttgggtcagtctgagctaccaaatgaaaccctgtccatctcctagtgtaaatgaataaataaacttgttaatttaaaaaatgcctgttgagccaaaagcatttgatcctacaaaggcttctagttatagccctttaaggtggctttaaattatactttttaaatatttaatgaaatattataaatattgactgggaaaggttaaagttgaaaaattagtaaaacaaaacattttgtatagcacttgtttgtcaaatatgctttatgtaaatgggagaaattatagttcttaagcttttgggaatgttaattttgttaatacttacttttagtgtgaatgtatgtgtgtgtcagggcatcacaggaatgtggtcatcagaggaccgctttcaggagttggttcttaatctttgccctttcactgatggaagccagagttccagctgggtggcaggcaccttttctctccgagccagctcagaagcccttaagttagaagatggaaagacatcccatgttcctggattggtagaattaatattgtcaagatgaccatcctaccaaatgcaatttacagactgaatgcagttctactcaacatcccatgacattctttacagaaatagaaacaaatcctaaagttcatagtggggcacaaaagatccctgaccatccaaggtagtcctgagcaaaaagaacagccctaaagagattaccataccaggttctaagcaatatcacagagccatagtaatgaaaacagccagctgttgcaaaaccacatgtagatccttagacccaaacatgaacacacataaccacagccgtctgtatttaacagatactccaaaaatacacactggaggaaagacagcatctttaacaaatgatgccaggaagactggatggccaaactattgagaatttttggaaaaaaaaatacttgtaacagaacaaaaatgaattcaagtacatatgtcctacatgtttatgtcttatcccagaaaacacaagatgaagacagctgaagacacaaaacaacctaagttgagaagcagagtttgagaccaagaggagccagaatgcattcacagagttctgtaacttgccgctgactgggccaaaggtttgcttctaagctttgcagattcatagatggaaaacatggtcagctatgcagctcagtgcccgcggtctgaggactcagactgtcatcaccaggcctggcatgtagaacacatgaagcatgtttgttaagtgcgtgattcagagaggaacacttgttttcttggatcctggtcagcaacactagctccttttgaagtggacattgtttaacaagagggcaggggtgaacagggaaactcagctcttccttacagttgtgactggagtttcgttcagcttttccttgtcttatcctccacatgaactaagagcatctcaacaaagtgtgtctcgataaaaaaatggtccatggtggatgctctgtatcagcagagcctgtaaaagattaacatttacaatgaatgcagttcttttcctctttgaatatgagagattattgtaacaaagtaatagacctcaggattcaaaaactaccagtttcctctcttggctgaactactgattcctgttacattctgggagaggaacagtcattgtcttcagttgtgttttcactgaagaccctacaggctacagcagatggttccagattcatggtaatactggctaaagtcagtgaatctcaagaacgaggcgcgaatggaggaaggggtgtagcaggggggaaaattggaggagtgtgtaatcagaatgtacattacacgaagttatcctataacaaaatcaaaagcttttttaatgatttttgccaagtgtggtggtgcatgcctatacttttagcactttagaggctgcagcaagagggccacagcctgaactgcagtgagtctgaggtacactggactacaaagtgagagcctgtttcaacaaacaaaactcaagagcagcaaaatgtccctagcacctcctttggtccatttctcctgtgtccctggatgtgagagatgtttagactctgacttcctgatatgaaggggtgttggctttggagcttctattgggagatgaaaaggagactgctcgaaaagcaacaggtcatgtgttttgaactcttggtagcttctagatgaaaagtccttcctgcgggacatcagcacaaatctcctgaccacctgttagcatccatcttatctgccttccaggctgcctgtcaacctgctgggacaggacagtgtgactgaggcagtgacccttcttgccatcagggaagtgtgtagcaggtccacatatgcagggtttgttgttgttgttttgtttttgctttttgttatttatacatttctttgttggttgtttttgttttgttggttttttgagttctggctgtcctggaactatgtagacaaggctggccgccaactcagagaggtgcacctgcctctgccttcccagtgccaggactaaaggcctgtgccaccacatccagctagtatgcagtccattttaacctctattacttacttcctcagtttaatctttattactttctctgctttctaaacaaggaagccagggtgtcaggagtcgcagtacacagctgaataagctgacttgaaatcagcatagctaactcaaaacctttgcccctgccactttgtgggtctccctttttggccaccaggcccatggggacagagggagcagagttcagagagctgtgaatatgacactaggacttccagagagacagccccagtgagagggctctgctttattatttcagggttgaggtatataagggtttttagggaatggtgggattgatcctaacatcgtacctaattataccgtgggaagggctgagcgggacttatgtgtgttcaggaagctctgtatagtgcaggccatcctcccgatgaggtcaggcacctgtgcttagagacactctccagacagagaaggtcactggagaggggcaagccctgctgagaaagggggtcctccattttgcactgagcttggggagctacccagacatgtggaccactaccttaatagtagggtcttccaataccacattacagtctgactaaaaggatgagttggcttgctaaaaaaagaatcgagatgtgagctctggcaactagattctgatcatttcgagagaactgacaaaattgcatttttttttcagcccccaaagggaagaagctgcatctgagcctgggagaccccacaaagcccattttctctctcgatgggcagagcccacattgcctttgtctttcacgcttctccaaacgtcttggcagtgttttggctcttccacaggtgaatccttagtaatttcttccctaacatgtctctccttagatgtgccaatctactcaagtttttttttttttttccaacttctgtgcttatgaactgaatactggctgcctcctgctttcacgcactggagctccctcccatgagcctgtgaacccattttctttcagctaaaatcatcttgctaactaaaccagcagctccctccagcatgagcacggaagagtcaagttaaacatcagtttaggtcagctaagacctacataacagcttatagctcctcctccacactgcacaggtcacttagtgtcctgtccctttacccctcaacccaagcgccactgtcctagattctctgaggaattgccaccagtctcttgagtagctgctttatttctagttttgtaccttcagagccaccatcctgtgtgctgctgccaaagactgagccaacatataactggagtttgccagttttgttgtaaaaacctctctctgctcgtagggtcacagttccgtttcctaaccagacagctcaatctttgtccctgcctgttgcgaggttactccaacaacaccagatattcacaaaagcccgaatcatgcaagttttccattctgtctttgctcaagctagtctgtgttccttaggtttctgcctttggcttgccaagttcttactcatcattttaagttatgtgaaatgactaaagaagaagattgacagcaaactctaaaatagcaaccacacagcagagctagtggggagaggacataaagaaaggatagactttcaaggatgcattaacccctgttggctaatagccagaatttactcttttatgtgtgtgtgaatgcatgttcatgtgtgtgcaggtgcacgtgtatgtacagtgtatgtgcaagctagaggataacctccaccttggtattttacagagtctgtcagtggtctggaactcagtgataaggaaggctaagttagttggctggtaaggcctggacctcatccacctgggtgaatcttgccctccccagtgctgagataacaagtgtgtgccatcatatcatatttacatgggttctggggactaaactcaggtctacatgattgtgaggcaagcatttcactgactgagatatcgccccagccccggtatccagaatttataaagaactcttaaagatcagtagacaggctggggtggtagtctttctcttccagacatgtttggctcctagcgccgctttgagacaactgcctgtaactccagtcctatgggatacagcacctttttctgacttcttcaagcaaccagatggcacggacacacgtggcagcaacacacacagttacacataaatgaagacaatcttttaaaaaaaatactagacaacacaaaagtagacaggataccaatggagagttcacagaagtcgcaaagcaaatgtttgctatgtttcaaaatgttcttcctcgctgatggcagagaaatcctaattaaagtgaggtcgcctcccctggtttctgcataatgctttggcaagcatttacagtactgacacaatctagtgaattaatccagttaattcgagagtggagagcgtggttatactttgtcttggtaagtgtgatctagcagcaaatcatggtcagttcttccacaacccagcagttacactcccaggattcttagtagctcagtgggaaaatgcctgcctccctcggatttgtgagaccctgagttaagttcccagtacaggaaagaagaggagggaatttctccagtcatttaagaaaagagtgactgcgggctgcagttgcagttcagttgtgaagtacttactagcacccatgagaatatggatccaggtaaaaagttgcatatggtaggccatgcttgtaatctgacccctggacaggcagagaaaggaggcttaattggcctatcatcctagcctaattaatcttcaagcccaggtgccagagagagaccctgtatcagaaactgcaatagaggctaaggtctcagcacccacatcaggagctcacaacttgctaaaattccatcttcagcagaccccacaccttccctcttctggactccatagactggtatgcacacacatactgacatatgtacacatgttaagattgttaaagattaaccttcagtgtgtctgcttacaacataaactcatattctgacatgcgaaaatatggtgctgttagggtatgtatttgagagccacatgcattgtcttgctatattgcaattccagtagtcaggaatcagaaatggcttggctgatttgttcagccttaggtttcctcatgacatttggatgagctgtcacatgtggtctctattaccgtgtggactccccatagaccatgtgatgtgtccatatgagagggagggcattagaccttcctagaagtgctaaagagaaaagccaagactgaagcttccagagtgacatgcttgtttctgctatgttgcattggtcaccaagactaacttcagtccagtgaagaagtcagtaaggatgtgaataaggaaacgggagctcactgggaatgggactaccttgaaagttaattaccacaaagtgttttaaaaacaagcttcatgagcatccaaataaacgatctcccaattttcctttataaaaagggtttgtatatgagtacgtgtgtaaaagactgaaggacagccagctatgagcagtgtgtgatgtggaagctggtgaacactgaggacagcctttgcttgttatttatagtttgttttctttatatgttctacaacaaatgagcatgtgccacatttacaattaaaaaggataaagtacgtttaattagaaccatacttctttctcctgaaagccatctctgctccttgtcaagctgatgtaatttccttcctggatgttctttctcttgctgctcttgtctcttcctggtgctccctcaccccccccccatgggtgcttccccagaggccagctgagagtagtcattcttgaatcctcccccaactgactacctagcataaaatagttgctcagtacatttgttgagtgagtgaactgaaagattgattttatgccactaatatttattgagtagctataaagataaagaacgtgtgtctagacctttggtaacttgattccaattggtcagatggctttgtgacctcagatcttcctaaatatactatgatatttatctttttcttgactttctttaggaacttacctagtaacaacttttgttagagatgggttaatttgttaggtcctactagggaactatatataatacagcagagaaaatctgctgtttcatacctcgtagatcagaaatactaagccaagtagtcttgcctaaatgagaagggtaaggtagctgagtcagcccccaatcttccaactaatgttagtatcaaaaatggaagtaattataattgctggcagaaatgaatcattcagagctagggctgtaggggctcttctttataacattctcttataataggatggcttgcagcagcggcccagttaattggagtggtcaggagaaacgggaatctcctattgaaaatcttagttaaaaaaaaagttcacgttcagtcttgatccctgtatattttgaatatactcttaaactatactcataatttgtatgactacctcagcctttcctaaacccttgtcaaccagagtctcttaaatagctagtagtgtgtaaccacagcttacagtaataaaactgaagcgttcccaggggaaccaaagcccaagagctactggggaaccggaaactttgaagcacagtgcagctaggggttattcctgcaaagtcagctttgcggggacccatacttacctgagtgcacacctgtcagggacacagcaggtggctgtgctgggcgctagcctaagcctgcctatggctgagatggtgtgctttctcacgagagcacccacaatacaaaagctggcccacatgagaaactgcagtgaacctggttctaattcctgttccaatttcttcctcctgctgagcttataatccgtttctacatctgtaccccacggttgggtgcatcatagaagtggaaaaccataaagataaaagatttcgaggaaatgtacccatgtgcccaggcaaggagatgtggtgtttaaaggtttgaaattccagtcgttaagagatgagaccccagtgactgaaagggacgtgacacagagaccagagacctcaaatccttagcttctcagcggaagcttggacatcactataaattttaaatagcatgggaaaaaaaaaaaaaaaaaaaaaaaaacgactgtagctggcaattacagaagccaagctagtggctctgcgctgctgagttttctgagggtcagaacgtaacttgcctgcaagtgaattcagatcaaagcctcactggggtgggggtggaaggacctggagcgagtgggggtgggggtagtcacaaaaggtaaagtagggaggaacacatgcgcacttttcacaatggggcagaggagtgctctctggcgagggaaagtggtacccacacaatcctactatctgaagccggttccctggaattcaaaaaccgttctccggaacacctggacagggtggagtgtctatggttcatccttgcgtcacacaccctctgctttctccctttcgtcatttcagcagtccatctatctctacctggcctctgggctccttcccctcacgctccttcactgctagtactatcagcttgccctcggttagtgtctgcttttgcctattttatatctttgcctaaattaagtgtgtccctccattcccacgacccgatgcccagacgccattctccataaggaaagctcctgcagcgccacgcaggatctcaggaccttttctgggaggggcgcagaacccaagctcacagcctggcaccagaaaaggccaacttcggggctccaaagcactccccagcagctggttcttttaaggccctgggatctaatgtcagggggcccgccgccctccagcaccgacgtgtctcatttcccgtgcagcgctgagagagaccgtgggtggaaaatccgctgcaactcgcgggccaccgggctgggggcgccgtcacttgttgcgaccaatgaacggtgctcagtgctggagcgttgtttctaataccgtctttagctgtgcaggggatcccccagcacgcaccccgctgctctgccactgtgggaagggaggaggtgccgcgcccggagagccgaccccggtgggcgctggatgccccagggaagcaggctccacccgccccgcggcagccgcctcagcaggtccagtccgcactccgcagagcatccttctgacccaggaaccacacgggacacagctcatcagggatcctcacctacttccaagtcgcggtctctaggattcccgccactcctctcacacccgtcccccacccctgccacttttcggagtcccccgcccccgcctcccggcatctgcggggcagtcgcacgcggagctgctgagccgggaggacgcccggctggagctgccctccgcagcccagcccgcactccctgcccttcgcttcgtcccgccgcccggcccgcgcccccgctgccctcgctctgcgcctccccgccgacctcctgcgagtctcgagctccgccacggcggggtacggcggggccggcgcgatgcggcagctgtgccggggccgcgtgctgggcatctcggtggcgatcgcgcacggggtcttttctggctccctcaacatcctgctcaagttcctcatcagccgctaccagttctccttcctgaccctggtgcagtgcctgaccagctccaccgccgcgctgagcctggagctgctgcggcgcctggggctcattgccgtgccccccttcggcctgagcctagctcgctccttcgctggggttgccgtgctctccacgctgcagtccagtctcactctctggtcgctgcgcggcctcagcctgcccatgtacgtagtcttcaagcgctgcctgcccctagtcaccatgctcatcggtgtgctggtgctcaagaacggcgcgccctcgcccggagtgctagcggccgtgctcatcaccacctgcggcgccgccctggcaggtgagcgggacccgcgtcaaccctggtccacccaacccacccggtagagaccgctgggac

SEQ ID NO: 2516 - DNA, 1405 bp, Mus musculus
tgtttccgcgctcgggccgggaggccgagtgacggcgggcgggcggaatgagcgcggcgcggacgctgcgggtgcccggccgcccacggctatgcggccgagttctctccgtacctgccgggccgcctggcctgtgccgcggcgcagcactacggcatcgcgggctgtggaactctattagtattggatcaaaatgaatctggacttcagatttttagaagctttgactggaatgacggcttgtttgacgttacctggagtgaaaacaatgagcatgtccttgtcacctgtagtggtgatggctcactgcagctctgggacactgccaaagccacaggccctctccaagtctataaagagcacacgcaggaggtgtatagtgttgattggagccaaaccagaggtgaacaacttgttgtgtctggctcatgggatcaaactgtcaaagtgtgggatccaactgttggaaattctctgtgtacctttaggggccatgagagtgtcatttacagcacaatctggtctcctcacatccctggttgtttcgcttcagcctcaggagatcagactctgaggatctgggatgtgaagaccacaggagtacggattgtgattccagcacatcagacggaaatcctgagctgtgactggtgtaaatacaatgagaacttggtggtgacaggtgcggttgactgtagtttgagaggctgggacttaaggaatgtgcgacagcctgtgtttgaacttctcggtcacacatatgctatcaggagggtgaaattttcaccgttccacgcctccgtgctggcctcctgctcctatgacttcactgtaagattctggaatttttcaaagcctgatccgcttctggaaacagtggagcatcacacagagtttacttgtggcttagacctgagtctccagagccccactcaggtagcagactgttcctgggatgaaaccataaagatctatgaccctgtttgtctcacggttcctggttaagacacgctgctctagtcagaaagagatactgactggcagactgcttacttagctagcatcagagcactaactactgaaagggaaaaattaggcctttacatgtactgagatttcacaattctcaaacttacattttgaggcatctgataaagacattgtgtcatattgtagtcctggtacataaactatgttttctggaatcctaaagaataattgttgttataatatatcttgtaatgtctattaaaatgttatctctatattgtaaaatgacataaaatatgggaggttagtagattacatggacagtaatatattttgttattaatttgtcattttggatgtacaatataaccactcctgttgataaaaatcaaaataaaccacatttcttgatcat

SEQ ID NO: 2517 - protein, 317 aa, Mus musculus
ARRGRCGCPAAHGYAAEFSPYLPGRLACAAAQHYGIAGCGTLLVLDQNESGLQIFRSFDWNDGLFDVTWSENNEHVLVTCSGDGSLQLWDTAKATGPLQVYKEHTQEVYSVDWSQTRGEQLVVSGSWDQTVKVWDPTVGNSLCTFRGHESVIYSTIWSPHIPGCFASASGDQTLRIWDVKTTGVRIVIPAHQTEILSCDWCKYNENLVVTGAVDCSLRGWDLRNVRQPVFELLGHTYAIRRVKFSPFHASVLASCSYDFTVRFWNFSKPDPLLETVEHHTEFTCGLDLSLQSPTQVADCSWDETIKIYDPVCLTVPG

SEQ ID NO: 2518 - DNA, 111348 bp, Homo sapiens
ctctaggcaagggcattccaaagttagcctggaaaataagctcaggccatgatgggaatggggagctggacatgcctcattataccctcctctcctttggaattactgatagaacagactctttaaatctgatgagaaacatttacatactgctttggatcctgaataaaatttttataaaattttaaaaaaaggaaacatttccaggcttcatctgcatgataaagcgttggtctccacaaccccttattagtaacccagttgttcctttctattgataatgactctttcaaccaatcactaatcagaaaatctttaaatctacctatgacctggaagccaccccctctctgagtgtcccacctttctggaccaaaccagtgtaaatcttacatgtattaattgatgtctcatgtctccctcaaatgtataaaaccaagctgtaccccaaccaccttgtggacatgtcaacaggaccttctgaggctgtgtcagaggcacattcttaaccttggcaaaataaactttctaaattgattgagacctgtctgagatacagtactcaaggttactcagggtcgtaatcacatatgagagattgtgtttttgccagtagtcctgttacccagcatgaagaagattagataaggaatagttggtggtaataactggaaaataaaagcattttgtgtttattcccccagtaagttgaggcatctttatcacaatatttatggccatttatcaccaaatgcagaaattatagtttgctatgatcttactgactgcatcacttccacatgtatgtgtatctctgctgaatagagtctctcatactttgaaccaaagcatgtgatttcaataaagaagaaccctgaaaataatgcacttcatgttgtgatgatttccattcttcctggtgactacgaatttgtgaaaaaaaagaaactctggaatatgttttcccccattacacattttctcttttgtgccctttaaaaatacatctttgctgtacagctagagtagagaaaaggttttcagaattctttttcctttttaggaagtaagttggtgttttcttgaagtcctgggctcgagtgagcctcccgccttggcctcctgaagtgctggtattacatgcctgagccaccatgcttggccagtgttttgtatttacataaacatttataaaggtttgcaaaggaaacattttcattatttttttttccaaaagcttattggataccctaaatccatattagtttttactttggtgctctctcatgcggcaaccatttctctgctcatttattattcctcccatgtatctgttaactttggattagtttaatgggaatacaatgtgaattgtcctgaaaataaggcacttaacaaccatcattaatgaacattagatcctcatttattagtggccgtcactcattctaagttatacagaagagagcatgaatgaactaactgaaaagaaacctattgcattaagcaacatatttccaatggcactttactttttgtatttaataataatatttatcaaattttattaaatgtttatgtagttttaatcaataatgctattcatactactattaataacaatacattaatgataactcagtctaaaaaaatataatccttaaagccatatggttataggaaatttatttattattattattattatttttgagacagagtctcgctctgtcgcccaggctggagtgcagtggtgcgatcttggctcactgcaacctctgcctcctgggttcaggcgattctcctgcctcagcctcctcagtagctggactacaggcgcccgccaccacgcccagctaatttttatatttttagtagaggtggggtttcaccatattggccaggctgatctcaaattcctgcccagaggtgatctgcccacctcagcctcccaaagtgctgggattacaggtgtgagccaccacacccggccccaggaaattttttaaaaattaaaatttcaggctaggcacagtggctcatgcctgtaatcctaacactttgggaggccaaggcaggaggatcatctgagcccaggaattaaagaccagcctggggaacatagtgagacccctcctctgtatgaaaaataaaaaaatttgccagacatgatggctggtgcctgtagttccagctactcaggaggctgaggtgggaggatcacttgagcctgggaggttgaggctgcagtgagctatgattgcaccactgcactccagcctgggttacaaagtaagaccctatttcaaaattaattaaattaaattaaaacatcagtttatgtacgtaattttctaatgtgataaatatgataaagagatcaataaaatgatttcaagcataaatgaacatgacattagagaaaattctacaacagaatagtagaatggaattacaagttcaagaagaaaaagaaatgacaaatttttctttttttgattttatcttattattattatattttaagttttagggtacatgtgcacaatgtgcaggttagttacatatgtatacatgtgccatgctggtgtgctgcacccattaactcgtcatttagcattaggtatatctcctaaagctatccctccccactcccccaaccccacaacagtccccagagtgtgatgttccccttcctgtgtccatctgttctcattgttcaattcccacctatgagtgagaatatgcagtgtttggttttttgttcttgcgatagtttgctgagaatgatgatttccaatttcatccatgtccctacaaaggacgtgaactcatcattttttatggctgcatagtattccatggtgtatatgtgccacattttcttaatccagtctatcattgttggacatttgggttggttccaagtctttgccattgtgaatagtgccacaataaacatacgtgtgcatgtgtctttatagcagcatgatttatagtcctttgggtatatacccagtaatgggatggctggatcaaatggtatttctagttctagatccttgaggaatcgccacactgactttcacaatggttgaactagtttacagtcccaccaacagtgtaaaagtgttcctatctctccacatcctctccagcacctgttgtttcctgactttttaatgattgccattctaactggtgtgaggtggtatctcattgtggttttgtggttttgattttcatttctctgatagccagtgatggtgagcattttttcatgtgtatttttggctgcataaatgtcttcttttgagaagtgtctgttcatgtcctttgcccactttttgatggggttgtttgtttttttcttgtaaatttgttggagttcattgtagattctggatattagccctttgtcagatgagtaggttgcaaaaattttctcccattttgtaggttgcctgttcactctgatggtagtttcttttgctgtgcagaagctctttagtttaattagatcccatttgtcaattttggcttttgttgccattgcttttggtgttttagacatgaagtccttgcccatgcctatgtcctgaatggtattgcctaggttttcttctagggtttttatggttttaggtctaacatttaagtctttaatccaacttgaattaatttttgtataaggtgtaaggaagggatccagtttcagctttctttttttttctttttttaaaattattattatacttgaagttttagggtacatgtgcacaatgtgcaggttagttacatatgtatacatgtgccatgctggtgtgctgcacccattaactcgtcatttagacaaatttttctaacagttaaaaatgaccttgttcgaatgttttttaaaaaattgatagtagtggatagcaggctttataagatggcccccaatgatccttgcccccaggtataatatttatgcccttgtgtaatctcatccccatgagagtgggcttgacctaaagacttgcttataacaaagagaatacagcaaatgcgatgggatgaggcttctgagataaggctatcaaagcactatgatttctatgctgctctcgtcttttgctctctctctctcttctgtgtgctctgaggaaagccagttgccatattatgaactaccgtatggagagcttcatgtgacacagaactgagggaggtcactagccattagccagccataaacttaggccctctgccctatggtccataagaaactgaatcctgccaacagttacttgaggaagcttgggagtagatcctccccgagtcaagtcttcagatcacccagcagccctggctgaccccctgattgcagtcttgtgagagacttttatctgccccagagaaactgtgagataataaatggttgttttcagctgtgaagcttaaggacaatttgttacacagtaatagataactaatataataatgataagtaccaaaagcctattgtttttagaatccatatgatacatttaaggttgatcaaatatttttacttttaaagtgacattaattttcaataaacttgaaattatgtcatttgcagctatttaaagttacgagaaaacattttagagggcaacttaaaacgtagatgtgcttcatcatgattataaagtatatgagccaaaaaattagcaaagtactaacagcattgagaaatccttacttcttggtgatagcaaaagaggttaagagagagaatcaagagtgaaatggggccaggcacagtggctcacatctgtaatcccagcacttcgggagatgaaggcaggcagatcatttgaggtcaggagtttgaggccagcctggccaacatggtgaaactccgtctctactaaaaatacaaaaattagctgggcatggtggcatatgcctgtgatctcagctacgtaggaggctacgtaggaggctgaggcaggagaattgcttgaacctgggaggtggaggttgcagtgagctaagatcatgccactgcactccagcctgggtgacagagtgagactccatctaaaaaaaacaaaaaaaaagaaagaaagaaagaaagaaaaagagtgaaatgggaactagagggtttaattttctgccatgaagaagtaattttaatacttgagccaagttagaatgcacacaactaaaatgatagcccctgccaattgagggcttacagttacacatgatacctgccccatttaatcctcacaacaaccttttgagggagatgttatcagcatatggatttgaaacagccaatgtatcacacctcatgttgttttgttgagttgagcctgcagaagaggcacctgtctatccagccatgtggggaatcaaggagctgtcagtacatgtgcagcatcatctaaaatattaatcctacccaagagctgaaagtagataaatagatgtcacacactttccaccacacaagctaaaaagcataaggcctggtttcaatcccaggtttctgactctaaacaccatgctcttaattgctgtctttccagaaaaagacgaaaagactaaatgcattttctactatgatcagattataccaattgctcttatattttttttctctccttccacatagaagtgcagtaaatgtatgtcctaaaccaacactctagttaagattctaattttattgtagcaaaatatacataccatacaatttaccattttaaccatttttaagcagacatttcagtgatgttgagtatatgcacattgttatacaatcaccgccatctatttccagaacttcatcttcctaaactgaaactccatgcctgtcacacaataactctccattccccacttccccttgcccctggcaaccaccattctattttctgtctgtatcaatttgactacactatgtacctcatataagtggaatcatacggtatttgtccttttatgcctggtttatttcacttagcataatgtcttcaaagttcatccatgtaagaatatccctcctctttagggaagaataatattccaccatatgcatatattacattctctttatgtgttcatttattgtcttagttggttcaggcttctataacaaactatcataaacttggtaccttataaacaacagaaatatatttatcactgttttagaggctggaaagtccatcatcaagccatcagcagcaggtttatgtctggtgaggtcccactttctggttcatagatgttcacttcttgccgtgtcctcacgtggtggaaggggtaagagggctctctctccagcctcttttataaaggtaatcatctcatttatgacctacttacatctcaaacaccccacctcttaaaaccatcacattggtgattaaatttcaacatatgaatttgggggggacagaaactttcagaccatagcatctgccaatggacacttgggttgctttcaccttttggctattatgagtaatactgctgcaaacaggagtgtacgaatatctgtttgaattgctgcatttaattcttttagatatatacccaaaagtggaattgcgagattatatggtaattctatgtttaattttttaagcaattgctatcctatttcccatatcagctgcaccattttacattaccacagattctaaaatttttaacaagaaagtataactaaaataataagtgatgaatgatataaaacgagcaaggtagacaattagcccataattagagactctcagagctttaagggtctctaaagtgcatcagtccaagtatccatcatatatttgaagatagtgcttaaagttcttggatgatgattacattaaccctctggcaaacattgattaaaggctaactaggtacccagcacaatgctgtgcagagctaaaaggaacaatgaaattatccatcctttcttggaattatttcccataactaccatatgcagcctgccgatttacctaggataatgattcacctgggtagaaagaccacgtatttcaattattttacttctggtctctctccatgggaaagatagactagttttaaaaatgatgtgggttggtaaatatttgcagttagagtctttgtgaggtcaccatagcagttataaaacaaaacaatctaaatataattgtagatccttatagaaacctgacatctagccatgtctgcctacattattaggccttccacagagttaaatggtcttccacagagttggccaagttcagaagttacacaactctgaggtgtaatgaatgctcataaaaaatggtttctgtctcagttgggaaataccaagtactcctaaacaatgacaagaacaggtggaagacaacaaaaagagtctttttttttttttttttttttgagacggagtctcgctctgtcgctcaggctgaagtgcagtggtgtgatctcagttcactgcaacctctgcctccagggttcaagcgattctcctgcctcagccttctccagagtagctgggattacaggtgcccaccaccatgcctggctaatttttgtatttttagtagagacagggtttcaccatgttggccaggctggtctcaaactcttgacctcaagtgttctgcctgccttggcctcccaaattgttgggattacaggcataagccaccatgcccgtcccttccaggcaattcttaactccaattctatccatacccctagcaaacttggactccacttagtaaagcatgggtggaggaaggggtgtggagcaagggcaggggacaaggagaatctaaggagcatttcatgttccttttccttaattttccagttcacctcaagttgtcaaacatttgtgcagtgtttactatatattggacattcttcaaggtactggagacacaaacaaattagacttggacattacttcgagatgctcaaaatctagtgtaagagtatggtttattttttatatgtttagttgtttatattttagaaagcttcacaggtgggatgaaatattttacaatgctataatcatgtatggttaggtaaggagcaggtaatagctcagtttgtgtgtgtgtgtgtatgtccaaggtcactgtaaatagtttaccccagctggaaccagcctttctccctccccagagataccacactatttttagcttagattggataactctttatatacaactctttgccaaggtcccagctgcttcatgtttgcttactttgatattttattaacgcctatttagcatttcaataaactccagaatgtttccaggttactttttgtagtattacgaaaaacacactgatcatttaggcactgtattaggctgcattcactcaacatttcctgaatgcttaaataccaggtccttgggatacaacagcgaacataacaagcaaaaatttctgccctcatgcagcatacattccagtgactacatatgataaaaatccaaaataatagaggccacactggtctggatcctcaagtgatccgcctgcctcggcctcctagtgtgctgggattacaggtgtgaaccaccgcgcccggcctgcaaaagtcttttaactggcctccccatctccaaactctatcctccatattagtgttgcaggactttttaaaataaaaccttggtcatttaatttctcacattagaaaacttccactgtttttcactgtttacagtagaaatccaattctcttagtatggtatataagactcttcatgatctagccccagtaaaacactctacagtctccccacccaatatttttttcaccgtatcccttccatctggccaggctgagtcctggcagccacgaccccctatggatcatgctggtttaaatctcctgggttgctcatgttattcctgctcctacaaagatctccatcttcttgtctacctaaagaaaacctactcatctgtgtgcaatcaccataaagacttatctctcttctgcagcctttcctgcaatttccatacctctggcacggacaatcaccttttaaaaataccccatataaatttatcatagcctctacagtattttgattacacttaactaattacatgacttctcttttagtcttcttctctaatctcttgaggccatggaccatatcccattattttgaatcccaaatgcctagtactgttcttggtatatggttaagataatcatacgacttggtttgtgcctgttgacctggcttaataattacaccctctttactctcaaaagtatcttggtttggcagataaattatatttggtcattctccacatagtatatgcctggcaataaatgaatgaatgagcaccagcatctgagcacttattaccatacaatatatacatgtatagtaatactttttaaaaaagttgtatatgatgatgtgctgcttttttgcttagcttcattagaactggccagctcctttttctcacttgccaagcatggggagttggtttggagttggtgtttcatcttttccagttacagtgtgaaagtagcccaccagcccacgctcttattcctaaagaccgcagtgactccacggacttaagttctcattgcttccagtttccttgggcaacgcagcacgcaattttggacgcgctgcgtggtttcagagtcggctgtaacttttctcactttataatcatcaggaaaagttcctgatgccagtcttccaaacgctcaatgaaataaaaaccagatagcaccgcagaggaggctgagatgcaacgacaaaagctgtcgtaattattaataatacctaaccctggatcactcccctgatagatctgtatctttgcagcaggcgcaattcagtttggtttcacccaaaacaaaaatggtctccgtcggagtcaacgccctttcctgtgcggaccaatcagaatctcaaacacagggcacggggcccacacttccgcccggtctgcctggtctctctaaccgcgccagtgtgcctccgactcggaacggcttccgcggccggggcagcgagggccgggggcggcgggcgggatgagtgcggtgtgcggtggagcggcgcggatgctgcggacgccgggacgccacggctacgccgccgagttctccccgtacctgccgggccgcctggcctgcgccaccgcgcagcactacggcatcgcgggtgaggcggcgccgcgcagctggggccggggggcggaggcggaggcgggggccagccgggctccagttcctcgcgctcgagggaaagcccctctgagcgtagacggttccgcgggtccacgccagggggcagaagaggcgctggtcggcgcttctcctttctttgccgagtgcgaggagttggtctgaagcaggagtcgatcttccagttgtgtgcaagtgcatatacgtgtagcctagtagcccgtgtccttgttccttgagaccgcgctgcctccgccacgtgtcacacgcccaggcacacgtccccgtagggagagccgggggagcctgcgcggtcccttggatcggtccgctcggcacagcagtacggggaagacggtctgagccagaaccgacccagggctcgcgagttggcccacaattcccagtctgcattcgagcactgagctgcgacctgcgggctggccttcctaaggacgatgctcctgaatggacgcctggagtcccacgggtgacaccatgaaatatatcaagttcagttcttacctgtagttgtctaacgaggaatgcacacattcgcaagtaggtgttacagactccagttaattgtctcccgtcgcgcgcattggctcagcctgtggttaaagctgctcaggaggctgaggcgggaggatcgcttgagcccgggatgttgaggctacagtgagctgagatcacatcactctgccccagcccagtgagctgagatcacatcactccactccagcctgggtgacagactgagaccccgtcttaaaaagaaaaaaggccaagcgcggtgcggtggctcacgtctgtaatcccagcactttgggaggccgaggtgggcggatcacttgagttcgggagttccagaccagcctgaccaacatggagaaaccccatctctactgaaaatacaaaattagccgggcgtggtggcgcatgcctgtaatcccagctacttgggaggctgaggtaagagaatagtttgaacccaggaggcagaggttgcggtgagccgagatcgtgccattgcactccagcctgggcaagaagagcaaaactccgtctcaaaaaaaagagtccatctagtccgtggactagatgaaaaggcgtaggttcattctcgcttttgccttaattcatgtcctagctattatacgcactgaagcgagatgcaaaaactcatttcataatgtcagtggtctattgtatttttttgttttgtcctacagcagaaaaaaatgttacttctaaaactcagagaaatacttgatttattttcattattagctcttagtgcttgcacattcagatttacatggcccaccagttagactgaagactcatgagtctataatggtagtagttttctttttttcttttttctttttctctttagagacagggtctcaccctgttgcctaggttgagtagagtggtgcaatcacagctcaccgtagcctccacctcctgggctcatatgatcctcctgtctcaacctcaccagtagctgggaccacaggcatgtaccatcacacctggctaatttttgattttttatttttgtagagacagggtatcactatgttgcccaggctggtccggaactgggtgcaagcgatcttcctgccttggcctcccaaagtgctgggattacaggcgtgagccactgtgactggcctgtaatgctacttaaaatcttatgcaaaaactctttaaagggaattggtatttaaaaaaaaaaattcagtcatgtttaaatagaagagattttcccccttggtctctataaaaagtaaacataacttttaaaatacaatggccctttggtaaaataatctttgacaggtaacatattaatactgttttcagcactttattaccaccagttatgtagtaaatcccaccaagtatctccgcattcatattttgttttaaaatcctgtgtgagatgtgttttagatttactggtgaggagtgcagtccctggggtctgtaagccagaggtttctcatctgtcagtaggaatgataacaccaacttggaaggtttgtgtctctggtgccttgtctggctacagagtaggcccttaagtatttcacccccctgttaggtccatgtctgaattccaatcataggtgcaatgggaagttgaatatttagtaactgaagtacaatatggaaaaacagaaatagagaacacatttggtattcatgtcccaaaaactttagggagaaattgatcacctgaccatttggtattcaaggtcccaaatactttggggaaaaatttgtggtattaaaatcaggtatcaattacttgataactccttgactttcgatgttaccctggcaggttcaaagggatgaccttgattttttttctctttaggctgtggaaccctactaatattggatccagatgaagctgggctaaggctttttagaaggtaagggggctgaaattattaaaggtatatattgttgctattaaagccttaatagaattaggttttgactctttgattaatgttttaatatacagtataaaaggaaccttggcgtttgcataggatgaagcttatttttagctgattgtggtggtgcgcacctgtagtcccagctattcccaagtctgaggcagaaggatcacttgaggccgggagttcaagaccagcctcgtgggcaacataggaggaccccgtctctaaaagaaattttttttttttatgcacagagtctggctctgtcacccaggctggagtacagtggcgccatcttggctcagtgcagtcttcccctcctgggttcaagtgattctcctgcctcagcctcccaagtagctgggattataggtgcccgccaccacacccggctaatttttgtattttttagtagagatggggtttcatcattttggccaggctggtctcaaactcctgacctcaggtgatctgcccaccttggcctcccaaagtgggtattatatgcgtgagccactgggcccagcctaaaaatttttttaatttttaggccgtagtcccagctacttgggaagctgaggtgggaggattgcttgagtccagttcaaggctgtagtgagctgtgattgggccactacactccagcctggatgacagaacaagactctttctctcaaataaaaaacaaaacaaatctgaagcctgtctcttagtgtccactcataaattataaaatttaaacataaaaaaatgtggagcagtatactgtgtactattacatttttggactactacattccactggactgttttttttaacctttctgaatctgttgccatatttgtcaagtacctactctacttaactcccgtagttgtgcagattacatgagatatacgtgttaaaatgtgtgataaattgaaagaaaaaaaaccataattgttattttttttgttgtgtagctgcctatgtaagtgttgtatttttttgttgtttgttttttcctagtgtagctttgactggaatgatggtttgtttgatgtgacttggagtgagaacaacgaacatgtcctcatcacctgtagtggcgatggctcgctgcagctctgggacactgccaaagctgcagggccactgcaagtctataaagaacacgctcaggaggtaggagggaaatctttctgggctgattatttttctttcttcgactttggttgaaatccatttggggatggacacatggagaaatatcttcaggggacaagtttaaacgttagcatttcttatacatactagatgtcacttattatttgattattcaaacataaagtacctcttggcctaaggagtggggaaagaaaagaaaaggtcagtcttctcattaggcagaaagaacacctccagcagtgtactctggcaccatttcctcctgagaggcccatcactttctttgtgctctaagaatgtgcttgccacatggtgccttaaggtagaggtaggtggacttttcacatagacatcacaagattgcctttggggcttcagtgagattcccgaggtgtttcagagtatattggagcaagagcataaaatactgagtatgaggcagaacttactgaagggattttatatctaaatctggttcatgtgtctagattttgtgtgtgtgtatgtatagcatagaaaatagtttgggcttcagttgtactaacatacatgtatattttcagtgaacataaagacatcctctttttgtgtttttaccttaaatgttttaagattttccttaagggagcagtacatccttcagatgaaaacttgctaatctactttcaaatttttgtccaccacagtgcctggcccgagaaggccctcaataaatgcttattagatgcaagaatatcagtcttttgtggtaaagattagttatgtgaggggtccagatgttttatagctgtagctattgacaatcaagatttctaagattgttactgaaataatgaaaaattttagtttctattttaattatgatagctatttgaataaatgtagttgtaaattactatgttttcagggaattactgaatattaagacaattttggtaaaggagaaattttagtttcaggataatcaatgcacgaatctctacagaacagtatgtccaaaattcagatacttttgtggaacctgtgtgaatttgtgtgtgtgtgtgtgtgtgtgtgtgtgtgtgtgtcagggtctcactctgttgcccaggctagagtgcagtggtgcaatcttggcttactgcaacctccaccttctggaatgggctcaagccattctcatgtcttagccacccgagtagctgggattacagacgtgcgccaccgtgccctgctaatttttgtatttttagtagagacgggtttcaccatgttggctaggctggtcttgaactcctgggctcacatgatccacctgccttggcctcccaaagtgctgggattataggcgtgagccaccgtgcccagccaatttttgtgtgtgtgtgtttttttgttgttgtttttttttgtagagatggagtttcgctatgttgcccaggctagtttttgtgatgtttgacatctttttataccacttgtattataatgtatttcttttccttctttcttttttaaaaaatatttttcttttcagaagttttttttttcctttttcttaaatctttggtgccttttattatctatataaattcaaggatgataactgacatcataaaataatatagctatttaaggtaaattcaatatattgacttaatgtttttctttcaatcaagtaaagtcgttgcttcatttatcctaaaacagtaatattcatgaaacaatggggttgatggctactttagtatgtacatttatttgtttttagtgtacattgagataagtaagtaatgaataaaataaatgtatgtaccagttaaaataatctctggtgtaactactctctggaaaatactgttctaggatatcctggatggatgctcactcagtctttacttcctgtcagtgaaagtaaatttcactttctcttgagataacttatttgacttttaggttgttctgattattaagaaactgcttcttgtaatcccaactctaccttctatagcaaccaactgctgcttttagtgtctttctctgaagtggcaagaccaggtccagcccctcttgtccaggaaacctcttgaaaatagccatcgtgctctcttccagactgtgcacttgtcatttcattgtcctgtcctcagatgacatgatctgtacgtctttcatccttctgatagcctcctttgataatcctgtttttcaactcccctttcaacatatacctaatttattccagaaatgtgatgaagggctaagctttataagattttaccaccatagtcttgagcccctagctctaataatattacctaaagtggctatacattgttctcagccatgtcttagtgttaggttactttgagtctgctagtaacacacttacctcttttgttatttgaactgctattaaaccagttttacatcattctgtgattttgcagctgatttcttgaaccgaagacacacttctgttttttaattttttaaatttgttttgcgtactgctattctagttagacttcctcgttttcttttcaaatgcactttttggtaagcgtttgtatcaggatgccttgaatgttagtgtaatagaaaacaattaaatggcttcaacagtcagagtttactgtttcacatattttgcttggttatgtgaaaaataaatgaagataacctttttaggtatttgttacagcagcacccctaattcttggcaccagtttctgcctcagtctgttcaggctgctgtaacaaagtattatagactgggtgccttataaagaacagaaatttatttcttactattctggaggttggaagtccaaggtcagggtgcccacatgtttgggttctgatgagggccctcttttaggtcaaagactactactgtcttttcattgtatctgcaggtggtggaaagagaatgagagaggtctgggaaatcccttttataagagcactaatcccattcatgagggctctacattcatgacctaattaccccccagaggccctacgtcctaaaaccattacactggggggttaagatttcaacatgtgggttttgtggggatatattcagtccattgcatatgccagatactcaaaaatacttaaaaggatttaagctcaaatgagagttttaaggagctagtaaatatttgttgaataaattaataaatgaggctgagtgcagtgagtcatgcctgtaatcctaacactttggaaggtcgaggtgggcagatcactgaaggccaggagtttgggaccagcctggccaacatggcgaaaaccccgcctctactaaaaataaaaaaattagctgggtgtggtggtgcacacctgtagtcccagctatttggtggctgaggcacaagaatcatttgagcatgggaggtggaggttgcagtgagctgagttcgtgccattgcactccagcctggacaacagagtgagaccctgtcttaaaagaaagttattaaaaaaaaaagttgataatgaacatagccaatttctgttttttttttttccaccagtatgttcagggaagctgtgttgtgaaatagaagagcaactaatgggtcattttcttctgtggaagagagtatataataaagacgtatagcatggttttagtcaatcttggatttgaatcccagctttgtaagttacctgttgtgagaccttgcgtatgtcacatatttttcctaaacttgagtgtttttatttgcaaactaagtttattagtagtctgtatcacagaccagcattgaataaatatgagctagtattattatttgctcttattataatagggtttgaaaaatgtaaaacaagttagaacttttccagttacccactttaccacttgatggctatgtgtccaacagtcaattttcaagttgtcagatgaagcaaaaaagagaaatccaagatttagatatattttaggctttgaggagtgaaggtcttggtgaaatgaaaagaaagaaaaacatggacattatctgtgtgaatggttgctaaacctagcatcgaagtaggaatcaaattcttctgtctattgtttaactggtgtctgcagaggtcattatgtcttttgagtcccataaaatgcctttggctttgcttattctaatgctgctgaatatataataaaaatttttaaaagttcagtgagaatagaaaaataagagtgaattgacaattttatttcactgctttctgacttaaaacactgtgctactgagagtgagttaaagtgactttaaagatgacataaatcaatgtaatatattaatttctaattttcagactaatgagttggcttatcacaatttaaaaatgagttaaaatttgttctcatagtcaaataacaaggtttatcaatttgctgaatttttataacatatttgatccattgaggtttttgagcattgcttataaaaacttatttttgacctaagtatacaactattagtattctgttatggaggaaatgtatttgcttatacatttcaagagttaaaatcttgtttactttaaaaaatgaatcaattatttactttttgataatgatagaagctgagaagtcaataatgataggtattgtattagtctgttttcacattgttataaagaaatacctgagagtgggtaatttataaaggaaagaggtttaattgactcacagttccacatgactggggaggcctcaggaaacttaaaattatggcagaaggtgaaggggaagtagataaccttcttcacaaggcagcaggagagagagaaagagagagagagaaagcaggggaaactgccacttttaaagccatcagatcttttgagaactccctcactatcacaagaacagcatgggggaaactgcccccatgatctgatcacttcctaccgggttcctccctggacacatggggattacaattcaagatgagatttgggtggggatataaagccaaaccatatcattccactcctggcgcctcccaaatctcatgtctttttcacatttcaaaaccaatcatgactttccaacagtcccccaaagtcttaacttattccagcattaacccaaaagtccaagtccaaagtctcatctgagacaaggcaagtcccttttgcctatgagcctataaaataaaaaacaagttagttacttctaagatacagtagggctataggcattagctaaatgtttcaaatgggagaaattggccaaaacaaaggggccacaggccccatgcaagtctgaaacccagcagtgcagttactaaatcttaaagctctgaaatgatctcctttgactccatatctcacatccaaggggtaggctcccatggccttgggcagctctacccttgtagctctgaaaggtgcagtccttatggctgctttcactggctggcattgagtgcctgtggcttttccagctgtacaatacaagctgtcagtgaatctacctttctggggcctgggggacagtggctctctcctcacaactccagtaggcagtgccccagtggggactgtgtggggccttcaaccccacattttccttctgtactgccctagcaaaggttctccatgagggctcctcccttgcagcagacttctgcctggacattcaggtgtttccatacatcctctgaaatttaggtggaggttaaactcttgtcttctaaactcttcttgtcttctgtgcacccacagacccaacaccacatggaagctgccaaggtttagggcttgcaccctcagaagcaatggcttgagctgtaccttggctccttttagccatggctggagctagagcagctggatgcagggcaccatgtcttgaggctgcacagagcagcagggccactcaggcccacaaaaccatttttccctcctaggccgctgggcctgtgatgggaggggcttctgcaaatgtctctgacatgccttggatacatttttcccattgttttggctattaatatttggctccttgttacttatacaaatttctgcagcaggtttgaatgtccccccaagaaataggtttttcttttctacctcatggttaggttgcaaattttctgaacttttatgctgtgcttcccttttaaatataagttccaaattcaaataatctcttcatgaatgcatgtgactatacacttttagaaacaaccgggtcacttcttgaatgctttggtgcttagaaatctctttcaccagacactctaaatcatctctctcaaattcaagcttccacggatctctagggcaggggcaaaatgccaccagtctctttgctaaagcattgcatgaatgacctttactccagttcccagtaagtttgtcatctctatttgagaccacctcagcctgaacttcattgttcatatcactattagcattttgttcagaaccatttaagaagtctttaagaatttccaaactttcccacatcttcctgtcttcttctgagccctcacactgttccagcctctgcccgttacccagttccaaagttgctttgacattttcagattatctttatagcagtacctcactatcctggtaccaattctctatattagtcctttttcacactgctataaagaaatacctgaggctgggtaatttataaaggaaagaggcttaattgactcacagttctgcatgactggggaggccttaggaaacttacaatcatggtggaagcagacaccttcttcagaaggtgacaggagagagagagcaagggaaactgccacttttaaaagcatcagatcacatgaaaactcacgatcactagaacagcatgggggaaactgcacccatgatccagtcacctcctaccaggtccctccttcgacacgtggggattacaattcaagatgagatccgtatcaggtgccaataaaaaatattaatgcagaatgacaaccagtcctgcatttaaaactagtgtgttttcttcagaaatgcatttatgtttaaaactacacaacacatttatcaactgaaggcatttttttctttgcatcctgtttcttttttaaaaattgaggaaatagttggacttgatatatttctttttgcatatttagtcatgcccagccattcattttggaataggttactgcagtaagattttattacaattgataatagccatttaaagcttttccctgtaaagattgtgattgtacagaaaaatagtttctagttagatgtcacttgaatcaattctccctttttggattttactgccattaggatgtgatatgtcatcacttttcaattctcatgttttaaaagcatttaccttcttttggctttgttttatattttaaagtttagacttgtattaaaaaaggcagacctgtctctacttgtagcacatattatatgccaggcatgtgccagtcattgaagatgtaggtataaataagactcatgtgctgttctctgattgtagtttgggacatgcagacaaaccatttagggtcccacgtaaattaaaaaacaacaacaacaaaaaaaacaaccattccgtacaacatgatagatattgaaaagaggtatctagaaggtacacagagaggagaaccagggactgccacagaagagttgctatttgacctgagtcttgggtagttagtagtttttagtagtttgctaggtagccctaagggaaagggacattttttgttttgtttttatcttgagatggagtctcactctgttgcccaggcagactgcagtggcacaatctcagttcactgcaacctctgactcctgaggcaagcaatcctctggcctcctgagctcgagcaatcctcctgcttcagcctcctaagtagctgggactataggtgcttgccaccatgcctggctaatttttgaattttttgtagagatggggtttctccatgttgcccaggctggtctggaacacttgggctcaagcaatccacttgccttggcctcccaaagtcctgggattataggcatgagccaccacacccaactgaaaaggacatttctgatggagaagagcctctacaaaagttaagatttgtgaaagagcgtggcatgtccacacaaccagatgtcctttgatgtgcctggagcatagagtgtgtgtactaggagatggtgtaatggaggtgggtaaggatcatatcctaatgggccttgaatacctggatggtgggggttggactttatgctttgaaaattcaggagaaagatggattgtgtagattttgggccacacactgtgggcagaaaacaggacatacatgtataggtaagtattagccattttctacttaatctgcttctttaagtattagctgttaggtaggactagactacaattcaggcatttggaattttaatacttaacataaaaaaggtgtgcaaaggcttgtcttaactctttagttttttgttttttgtttttttttgagatggaggttcactcttgttgcccaggctggagtgcaatggtgcaatcttggcccactgcaacctccgcctcccaggttcaagtgattgtcctgcctcactctcccaagtatctgggctaacaggcatgactaattttgtatttttagtagagatggggtttcaacgtgttggtcaggctggtcttgaactcctgacctgaggtgttctggccgcctcagcctcccaaagtgttgggattacaggcttgagccactgtccctagccttaagtctgtggttcttaaactttgcagcagattagcatcactttgggagcttacaaaaatttttttttcttttttttttttgagacaaagtcttcctgtcttgcccaggctggagtgcagtggcatgttctcagctcactgcaacttccacctcccgggttcaagcaattctcctgcctcagcctcttgagtagctcagattataggtgtgtgccaccgtgcttggctgatttttgtatttttagtagagacaggatttcaccatgttggccaggctggtctcgaactcctgaccttgtgatccgcctgactcgtcctcccaaagtgctaggattacaggcgtgagccactgcatccagccaggagctttaaaatatcttcatgcccaggtcacagtgtctggggctggagccagacatcagtattatttaaagattcccagatgatttcaatgtgcagcattgtttggaagccactgccttgacttggtaagtgttcaattctaatgaccttcgtaagtgtgttatctagtaatttggagattgcaatattcaaaatatagatttaaaaaacctttaataaaaggagcgatttgatttaccttgcaaaatcattattcccaacccattatctaacctcaaagtttctaaaattttttaaagaagagaaaatgatagttttaaatagatggaaactataatagaatatgttcagatagagaaggactttgaagcatgactgctgctactatatctgtagtctctctcatacacacagtgtaggtgtcaacactatgcatgtctctgaagtgagttagtgagtgaattgtagatagaaattaaaatccccatctctgattttagaatctattaaaaagcatatgtaggagaattatgcaatcttatttgagaacttatatgaaactggaaattagttttgctgcaagctaatatgaggtgaaattattggtagagctatgtaaatatatgtaaaatttgttttacataaagaggaatagaagcatatatatttaactatagctgttatatattataaatatatatagtgtatatacatttcaaaaagaaacaatggaaaaataattcaaaaactaataaaaatggttaccttgaaagagggggtaaggtagaaagcaggggaagggggaccagaatggaaataagatttcttcagatataacttgtattatagttttgaccttggaaccattgaaatgttttatgtaattaagaatcccaatatgttaataagttggaaagaaaaagcaattgctaaaaattgaaaacaagcacattaatctaaagatctatcaaattggtgccataactaggtattgaaaataattattcaagtgactttaaaaacccagtattgtgattatacattcctaataagatcagtctaatgaacaaaaataattaggcctgggcatagtggttcacgcctgtaatcccagcactttgggagatcaaggcgaatgggtcacttgaggccaggagttcgagaccagcctggccaacatgttgaaaccccatctctactaaaaatacaaaaattagccgggtgtggtggtgaacatctgtaatctcggctacttaggaggctgaggcaggagaatcgcttgaacccgggaggcagagtttgcagtgagtgaaatcatgccactgcactccagcctgggcaacagagtgagactcttgtcacaagaaacaaaaacaaagaattggaaagaaatttgaaactgcattcaaaaaaattaacattgttactttgaaactcatatgtaccttgtaggataaggcatatcagtaattatgtcattagaaactgaaagttttagccgcgcttacgcctgtaatcccagcactttgggaggctgaggtgggcggatcacagggtcaggagattgagaccatcctggctaacacggtgaaaccctgtatctactaaaaaatattttaaaaaattagccgggtgtggtggcggcctctgtagttcagctgctcgggaggctgaggcgggagaatggcgtgaacctgggaggtggagcttgcagtgcgccaagatcgcgccactgcactccagcctgggcgacagagtgagagtctgtcacaaaaaaaaaaaaaaaaaaaaaaaaaaaagaaactgaaagttttaaagtgagagaaaagcgttatgagaataaagaagtagaagcgatcttaaagttaaatggggaatagttatataaacttgtgatttatttttctctgtctaaaaaaagtacatatttctttgttttttgcacagtaaagatttagaagcagtgacaactgagtagcagtgaatattcttagtgccctgagtatggcctctaaatactgtttgccactaacaggaatagtgtctttgcagaagtcatttattccagagctgagcaggaatgcaagatatcttcttgtgtcagaaagcaggaaagctatgaaaggccgctggagacatatcaaaggtttagaaggtacaacttgaagggactctcactggccgaagatgagactattggaacaaccaaaagaatgaaagcaatgaatttaaacgccacacacacacacacacacacacacacacacgtacatgtattttcagtccttacgtggagatggagttgtgattaggaaaaatgtagtcaccattgaagattattaggacatccagctcattattctgaaaattgataaacaaaagtaaagaatcagtgcatttactttccctttcttgtatgagttttattgtggtattataaaatagttgataagaaaagttcttgctaatagagttctagctaataaatgcagaaggaataacagaattagaaaatcactatttagtagcccgtaatgaaataatgattaggcagggatcatgtggatgctaaaaccattagtttaagattgaaacattctgtgaacaatcttaggatcactaaaagtgggtcaaccagaaattatatgcctcctaatataattggaagctaaaaaacatgaactgaatctgattaagcctccagatctaacttctaatttaaaggaaattggaagggtagagaaaaaagttaattaccaccatgaggaaacatttgggataatccagaaggcaagacattctacaagaccaataacttggttttttcaacaagtaaatgttatgggatgtggggcagaaagagcaaggtgtcaggaggaggactgtcctagcttagaggatacttaagagacataacagctaagtgtaaaatgtgggtcttgtttgggtactgattcaaataagccgactgtaaaagaaacatttttgggacagtcagggaaatatgaataaggactgagtgttaaatgatattaagtagccattgttaatcttgttggggtgaaattggcctgtgcttatgtaaaaaaagataaaccagccttacctgctgaagtatttaggaataaaaggtctgatgttagaatactccagcagtcagtcattcagtcagtaatgggacagaagaaacatgatgggcaacatgttgattattatggaaggtgtgtaatgggtgcctgggggtttattatactattctctctacttttatgcatgttttaaaatttccgtaatgaaaaaacctgaaaatttaagtttcagggctgggtatggtggctcatgcatgtaattccagcactttggaaggcctaggcagggggattacgtgagcccaggatttagagaccagcctgggtaacatggtaaaaccctgtctctacaaaaaattaaaaaattagctggtgttgtggtgtgcacctgtggtcccagctacccgggaggttgaggtgggaggatcaattgagcccagaaggtggaggctgcagtgagctgtgctcgttcgtggcactgcactccagcctgggtaacagagtgagatcctgtctcaaaagagaaaaaaaagagaaaatttaagtttcaccttaaaagaaatatatagccctttctaatcactcagtaattaaaagtcagtgaccctttcctttgtattcatacagataataataaaaattctggacatagttttttatttgacaatttttaattaagtagaccaacttaaaaagggcaatgctttacagtagattaaatatgagctctttgggaattggtttcagtaataaaatttgtcctctcaaactgtggttttgatgaggttcagatttcataaagcagcacaaaacattgtgcggtgggtttttttcttttcccattttcctggttaattttcttcaccactgccaagagtaatttaatcagataggcctctagaggaccctgctcttaaagcataaagtcaggcactgcatatctctcttcctttttatatttaatttgaccatttgccatgcccactatttgagtgggtgtggacggggaggttgggaataaggaagagatggaagaggagactaatagaagatgtgcttttcattcagatttgtttctcttttccttcattcattccagaaacttttattaactctactgtgtgcaagatactgtaccaggctagctgggaagacaaaacaccttaggcatgcccttgccctcctggggtccttgcactgtctggggaggcaggattctggttgtctaatgtctaatgtggtaagcgctgtgaatgtatgcagtgttatgggaagggaggatttgtctggggaaggggcagggagggcatcctttggtctaaaggggaagttggaatgaattattcaagtggagaggccagggtagtagtgttagaggcaaatgaaagagcatgcttgaccagagaggatagagcctgtgtgcttagagctgtcagcgttttggccattgtgccaagatcagtggaaagacattgcagattttaaaaatcaatgaaatattttatacattataaaatacatgtaagatgtaaaaatggtatattgaacacacatattcaccatctagcttaagaaatgaaacattacctataccattagcgtcccctgcttaccctttctagtcttatcgttcttctctctgcttttttttcttcctcgcttcttcccaggagtaaccactagcctgaattttctatttatatattttttgcttttctttctatttttactacatatgtatgcatccctaagtcatgcatagttttgcatgattttgacctttgggtagtaagaatcagcatggatgaatctcacataatgttgagcgaagatgctaagttgtaggagctacatatagtgtgaaaccattgaaaggctttgcacaggggagtgacatttaatttgtattttctaaagattactttttatgcagtgtggataatggattggaggtaaacaaaaatggatggggagagcagttagaaggatgttataatctaagtggtaacttatggttgatggttgtaacctcttaagagaaatcatagacaaattcttagccatagccctttaggatcttatccctcccagctattcaaccttgctcttccctgaatctggcaagcttgttccctgttaaggtctttccctgttctctgtaacctgagcctttcatctcgggtctgcagagttcagtctttaactgcactcaagtctctgcacagagaggtctttcctggccattttgttgagaagtgaccccctgcccttgtcattattttctgttctccttactctgctttttctttgtagtttttaaaaaaattgcaacttgaaattatacatttatttatagcatgtttgctgctgctaaaatataagatccatgggggctggtcttatctaaaattgtaacctcctttccccccgtgcctagtacatagtaggtgctcaataaatatttgttgaatagatgagtgaattgattgaagttgggataatggaattcattcttcccttttcagctgtttctcaaacatctctctggctgtgaacttttttcagagcttgaggttaatgcccaaaccctgtcttgctgtcacctcaaactcagtatatataaaattacattattttccttcctccagtctttcacttttgttaatgctgccatcactgacagtcctcaggcacaaaaccttggtgttatcttgcagtgttcactacccccgatccctagggtgctgtatattcccatttatgtgtttgaggaagttttctggttactgtttcacctctgctttttgcctattgacattttagccagccctcagggccctgcctcagtctttctcttctgagcacgaagctgaatttccatccaagcaccccttttgtacttatgtttatagtttgttttgttttgtttttgagacaaggtctttctctgctacccaggctggaatgcagtggcgtgatcactgctcactgctgtcttgaccttgaccttgtgggctcaagccatcctcccaccccagcctcctgggtagctgggactactgttataggtcaccacacctggctaatttttaaaattttttatagagacgggggtctcgccatattttccaggctggtctcgaactcgtggcctcaagcagtcctcctgcctcggcctcccaaagtgctgggattacaggcatgagccaccatgcctggtgtaattactctttttttaaattaaaaaaaaaaacccacacagtctcctgatctgttagttcctttcccatgtcctaatattttaaacatagtattgagttgcctttcttttctttttcttttttttttttttgagacaggttctcactctgtcacccagcttaaagtgcagtggcacaatcttggctcactacaacctccacctcctgggagcgattctcctgcctcagcctcctgagtagctgagactgcaggtgcctgccatcacacctggctaaattttatatgtttagtagagacggggtttcaccatgttggccaggctggtcttgaactcctggcctcaagtgacctgcccgccttggcctcccaaagtgctgggattacaggcgtgagccaccgcactcagcctatttccttctttatgatcccatttttaacttcaccaccatgtgtgtcctatctttagctctgtcatagagacctaatgcttgctacttggttgtgcaacagaagacagctgacagcaacaatgccatcagcatggttttcttaccttctatctttgatgttgattcaggctggattctcttgagccggtggaggctcctgcagttttagaaggtgagtagtcataaggtgtcacctgctgcatcacactggaaatgtgtggaggcagtggagtctgagctgatgatgagtatttacttagtagttctctgtacctacctagcagtgattcaggttgtaaagaaaaatttaattggttaaattattttaaccaatgtttgagtgcctattttactgtgatgaacatagatgtacaagatgttttgctcattaggagtctccaaaatctagcaggtatgtgagttatgtaacattctttttagtaaataaaatatggtaaatgctgagttagaagtaggtgtgagctgctgttgaaggcagcatatgactcattgaaggacttatcaggggaggcttatttcgtaagggatgtaatggggcacgtcttgatggataaatggaaattcacaagtggagaggggctttaagatctgtgtataggtaattcatgaaaacacagtggaatcaatctaggcccaaatgtagctccagtaaagggtgaaaccagcaggggtagagctttagttccttgatatcatggcttaaggtagccaagaagttctgattcaacagtgccctcaagtagcatgctgtacagatagcctcacattgcgattaaaagtggactctgcaattaggctgcccacgttcagatttcatatctgcaccttactagctttgggactctggacaagttacttaacctctctgggccttgatatagtatctacttcatataaatgaagattaaatgaaataaaatacataaagtgcttatgaacaggatctgacactcagagtgttcaataaaggtttgctatttttatttttgactgtttacatcagcctagagcaggggttggcaaactacgtcatgtggaccaggaccaaatctggcctgcagttagatttacaaataaagtttttttggaatcaagccatgcgcattcattcggtattgactatggcttcttggtgtgtgctataagagctgggtttagtagttgtgacagtgaccaaatagcctgtaaaatctaaagtatttaccatatggccctttatagaagaaatgtaccttttttgaagaaacttaccatttactatatggtcctttgtaggcgaaatttagaggataaaatcaaactccttagctctcaagatcttcagtgattgcttccaaaccagccttttttctatccataactaacagatggccacagcagctctttggttttcactggcccttctattccttttatagctgctgtctgttgctggattgtgcttcctttagtgttccaactactcttctgtcttttgcgtgaatatgggcagaggcagggccaggactagggtagaatgtgtgaggcactcactctaggtacacaatttaagggggccccaaaaaacttgataatcaagataatttgttaatgtttttaaaaataaaaattaatgcaaaaaacccattatgaacaaaatatcgatattttactttttttgaagcttaatattaattttattaaacttttttccaggtttattatgattggcaaataaaaatttgtaggctgggcacggtggctcatgcctgtaatcctagcactttgggaggctgaggcggtaggactgcttgagcctaggagtttgagaccagcctggggaacatggtgagacactgtctctacagaaaataagaaaaaaattagctgggtgtggtggcacgcaagcgtgactccagctacttaggaggctgaggtgtgggaggaccgcttgagcccaggaggtcatcgctgcagtgagctgagattgtgcccactgcactccagcctgggcgactgcgcaagaccctgttttggaaaaaaaaaagaaaaatctaagttgtacagcttagggttttgatctaaatatatcttgagtaatgattcctacagtcaagctaattaacatatccatcacttgaatggttaccattttcttgtgtgtgagataagaacatttcagatctactctcagcaaatttcaagtattcagtaatacattattatttataatagttaccatggtgtacattgaatctctagaaattattcatcttataactaaaagtttgtatcctttgaccaacatatccccatttcccccacccccagcccctggcaaacactactctactgtatgtttctctaagtttgacttttttagattccacctataagtgacgggatcagtattactgatgttttttttcctcagcctccaacatggctcaatatagtactgggcagcagagagaaagtaacccacatgtaagcggcttaagcccagatactcatacttcctacgtatatgtgggagagagtagtaagattcaaagtaacctgctggctgatcaccaatgtgatataccaatggcatatactcaggtccttgtcaggactaatttcataaagtataattatgcacatattttgttgaacttagtttacagcagtgatctgtgtataatctgttgtataaaatgaaagaatgaaaacatttccaaaagttttcaagtagttcatttgaaatggttcactgagagcagtgaagcatatactttagaatagcagcattggataactaaaactgtttaccaagagatctggaaggatcacctggttcctgcaagctttttctaagaaaggccagatagggatattaattgaattttaatgctttccaataaacattgacccagcaagcttttttagatgactaactttctaatctgctttgacatttcttcgtggggctgcaaacagtgatttgttggtaggttttaaaatatgtataatttgttttagtgaagaaggtttggaagtatactgtagaattctgtgaaagcagaatggagtcttatctgtaaggaataagtctggaggaatggacaagatcaacttttcatttctcagacaccttgttgagatggataggaattatttgatgttttgacatagtaaattagttgttctgcctctcattgttatataacaagagataaaatgcaatgttgaacttgatggtcttttgctttctaaacacttttcaatgtttttaggtgtatagtgttgattggagccaaaccagaggtgaacagcttgtggtgtctggctcatgggatcaaactgtcaaattggtatgttagcattattgtattcaaaaacgaatattcccttctctagagcttccactaaattttcttctctttttccaacatacttctgtagctctatgattcgacagctgagctttcttttaaaaaaaaaattaaaacacttattagaacttaaaattttctaatcttttggctgtgaactaatagttagctcagcattagtttggcccttaaatacagtcttgctttatatcaaaacagatctttaaaaatccttgagatctgtatatatattgtatgcatatatataaatgtatatagtttattggtgtatgtagtatatgtaaaagcataaatttgaatttatccctcaagtaattgatctattcatttatttgtagtgggatccaactgttggaaagtctctgtgcacctttagaggccatgaaagtattatttatagcacaatctggtctccccacatccctggttgttttgcttcagcctcaggtaaattattctgtatttaccaaaagccttacttgtagtgaatggtggccttgtttttaccattaggtggcgctgtgtaccttagcttcagagagaaaacaggagaatattactattcttttgtgttcttaagactttacttctttttttatttttatttttttatttttattattatactttaagttctagggtacatgtgcacaacgtgcgggtttgttacatgtgtgtgcatgtgtgccatgttggtgtgctgcacccattaactcatcatttacattggatatatctcctaatgctatctctccccccttcccccaccccatgacaggccccggtgtgtgatgttccccatcctgtgtccaagtgttctcattgttcacttcccacctatgagtgagaacatgcggtgtttggttttctgtgcttggaatagtttgctcagaatgatggtttccagctttgtccatgtccctacaaaggacatgaactcatccttttttatggctgcatagtattccatggtgtatatgtgccacattttcttgatccagtctatcattgttggacatttgggttggttccaagtctttgttattgtgcatagcgccgcagtaaacatacatatgcatgtctttatagcagcatgatttataatctttgggtatatatccagtaaatggaatggctgggtcaaatggtatttctagttctagatccttgaagaatcgccacactgtcttccacaatggttgaactagtttacagtcccaccaacagtataaaagtgttcctatttctccacatcctctccagcacctgttgtttcctgactttttgatgatcgccattctaactggcgtgagatggtatctcattgtggttttgatttgcatttctctgaaggccagtgatgatgagcattttttcatgtgtctgttggctgcataaatgtcttcttttgagaagtgtctgttcatatcctttgcccactttttgatggggttgtttgattttttcttgtaaatttgtttaagttttttgtagattctggatattagccttttgtcagatgagtagattgcagaaattttctcccatttcgtaggttgcctgttcactctgatggtagtttcttttgctgtgcagaagctctttagtttaattagatcccatttgtcaattttggcttttgttgccattgcttttggtgttttagacatgaaatccttgcccatgcctatgtcctgaatggtattgcctaggttttcttctagggtttttatggttttaggtctaacatgtaagtctttaatccatcttgaattaatttttgtataaggtgtaaggaagggatccagtttcagctttctacatatggctagccagttttcccagcaccatttattaaatagggaatcctttccccattgcttgtttttctcaggtttgtcaaagatcagatagttgtagatatgcggcattatttctgagggctctgttctgttccattggtctagatctctgttttggtaccagtaccatgctgttttgattactgtagccttgtagtatagtttgaagtcaggtagcttgatgcctccagctttgttcttttggcctaggattgtcttggcaatgtgggctcttttttggttccataggaactttaaaatagttttttccaattctgtgaagaaagtcattggcagcttgatggggatggcattgaatctataaattaccttgggcagtatggccattttcacgatattgattcttcctatcaataagcatagaatgtttttccatttgtttgtgtcctcttttatttcgttgaggagtggtttgtagttctccttgaagaggtccttcacatcccttgtaagttggattcctaggtattttattccctttgtagcaattgtgaatgggagttcactcatgatttggctctctttttgtctgttattggtgtataggaatgcttgtgattcttgcacattgattttgtatcctgagactttgctgaagctgcttatcagcttgagattttgggctgagacggtggggttttctaaatacacaatcatgtcatctgcaaacggggacaatttgacttcctcttttcctaattgaataccctttatttctttctcctgcctaattgccctggccagaacttccaacactatgttgaataggagtggtgagagagggcatccctatcttgtgccagttttcaaagggaatgcttccagtttttacccattcagtaaatattatcatattggctgtgggtttgtcataaatagctcttattattttgagatacatcccatcaatacctagtttattgagagtttttagcacgaagggctgttcaatttggtcaaaggccttttctgcatctgttgagataatcatgtggtttttgtctttggttctgtttatatgatggattacatttattgatttgcgtatgttgaaccagccttgcatcccagggatgaagccaacttgatcttggtggataagctttttgatgtgctgctagattcagtttgccagtattttactgaggatttttgcattgatgttcatcagggatattggtctaaaattctcttttttttgttgtgtctctaccaggctttggtatcagtatgctgctggcctcataaaatgagttaaggaggattccgtcttgttctattgattggaatagtttcagaaggaatggtaccagctcctctttatacctctggtagaattcggctgtgaatctgtctggttctggagttttcttggttggtaggctattaattattgcctcaatttcagagcctgttattggtgtattcaggggttcagcttcttcctggtttagtcttgggagggtgtatgtgtcaaggaatttatccatttcttctagattttctagtttatttgcatagaggtgtttatagtattctctgatggtagtttttatttctgtgggattggtggtgatatcccctttatcattttttatagtgtctatttgattcttctcccttttcttctttattagtcttgctagtggtctatcaattttgttgatcttttcaaaaaaccagctcctggattcattgatttttttgaagggttttttgtgtctctatctccttcagttctgctctgatctcagttatttgttgccttctgctagcttttgaatgtgtttgctcttgcttctctagttcttttaattgtgatgttagggtgtcaattttagatctttccttctttctcttgtgggcatttagtgctatgaatttccctctacacactgctttaaatgtgtcccagagattctggtatgttgtgtctttgttctcattggtttcaaagaacatctttatttctgccttcatttcgttatgtatccagtagtcattcaggagcgggttgttcagtgtccatgtagttctgtggttttgagtgagtttcttaatcctgagttctagtttgattgcactgtggtccgggagaaagtttgttataatttctgttcgtttacatttgctgaggagtgctttgcttccaagtatgtggtcagttttggaataagtgtgatgtggtgctgagaagaatgtatattcagttgatctggggtggagagttctgtagatgtctgttaggtccgcttggtgcagagctgagtttaattcctggatatccttgttaactttctgtctcgttgatctgtctaatgttgacagtggggtgttaaagtctcccattattattgtgtgggagtctaagtctctttgtaggtctctaaggacttgctttatgaatctgggtgctcctgtattgggtgcatatatatttaggatagttagctcttcttgttgcattgatccctttaccattatgtaatggccttctttgtctcttctgatctttgttgtaaaaaaaaagtctgttttatcagagactaggattgcaacctctgcttttttttttgttttccatttgcttggtagatcttccttcatccctttattttgagcctttatgtgtctctgcacgtgagatgggtctcctgaatacagcccactgatgggtcttgactctttatccaatttgccagtctgtgtcttttaattggagcatttagcccatttacatttaaggttaatattgttatgtgtgaatttgatcctgtcattatgatgttagctggttattttgctcgttagttgatgcagtttcttcctagcctcgatgggctttacaatttggcatgtttttgcagtggctggtaccgattattcctttccatgtttaggactttacttcatcaacctcttgacaagagttagctgtggttcagattacttttcaatgattccaactcctaaagaataattcctagatttctggcaaggacaaattcatggatggtaatgttataactgagatatgatacatgtttgaaagagaaggtcttgagttttgttttacaacactgtttcagaacctgtgagacacgcatctgcttgtcaatgagcaggttgagcttggagctgagaactctggcctcatgaataaaaattgtatcattggcttagaattggtaactaaagccattgcagtaaatcagagcacctaggaaagactaagtcaaagaaaccttggaatagagcacaagttggcaaactactgccctcagatcaaaactgatggtttttttttttttttttttttgcattgtctaaagatatttatttctgctgtcttttttttttattttttttttatttttaattttttttttttttattatactctaagttttagggtacatgtgcacattgtgcaggttagttacatatgtatacatgtgccatgctggtgcgctgcacccactaacgtgtcatctagcattaggtatatctcccaatgctatccctccccccctcccccgaccccaccacagtccccagagtgtgatattccccttcctgtgtccatgtgatctcattgttcaattcccacctatgagtgagaatatgcggtgtttggttttttgttcttgcgatagtttactgagaatgatggtttccaatttcatccatgtccctacaaaggacatgaactcatcattttttatggctgcatagtattccatggtgtatatgtgccacattttcttaatccagtctatcattgttggacatttgggttggttccaagtctttgctattgttaatagtgccgcaataaacatacgtgtgcatgtgtctttatagcagcatgatttatagtcctttgggtatatacccagtaatgggatggctgggtcaaatggtatttctagttctagatccctgaggaattgccacactgacttccacaatggttgaactagtttacagtcccaccaacagtgtaaaagtgttcctatttctccacatcctctccagcacctgttgtttcctgactttttaatgattgccattctaactggtgtgagatgatatctcatagtggttttgatttgcatttctctgatggccagtgatgatgagcatttcttcatgtgttttttggctgcataaatgtcttcttttgagaagtgtctgttcatgtccttcgcccactttttgatggggttgtttgtttttttcttgtaaatttgtttgagttcattgtagattctggatattagccctttgtcagatgagtaggttgcgaaaattttctcccatgttgtaggttgcctgttcactctgatggtagtttcttttgctgtgcagaagctcttgagtttaattagatcccatttgtcaattttggcttttgttgccattgcttttggtgttttggacatgaagtccttgcccacgcctatgtcctgaatggtaatgcctaggttttcttctagggtttttatggttttaggtctaacgtttaaatctttaatccatcttgaattgatttttgtataaggtgtaaggaagggatccagtttcagctttctggaagcactggaagcattccctttgaaaactggcacaagacagggatgccctctctcaccgctcctattcaacatagtgttggaagttctggccagggcaatcaggcaggagaaggaaataaagcgtattcaattaggaaaagaggaagtcaaattgtccctgtttgcagacgacatgattgtttatctagaaaaccccatcgtctcagcccaaaatctccttaagctgataagcaacttcagcaaagtctcaggatacaaaatcaatgtacaaaaatcacaagcattcttatacaccaacaacagacaaacagagagccaaatcatgagtgaactcccattcacaattgcttcaaagagaataaaatacctaggaatccaacttacaagggatgtgaaggacctcttcaaggagaactacaaaccactgctcaaggaaataaaagaggacacaaacaaatggaagaacattccatgctcatgggtaggaagaatcaatatcgtgaaaatggccatactgcccaaggtaatttacagattcaatgccatccccatcaagctaccaatgactttcttcacagaattggaaaaaactactttaaagttcatatggaaccaaaaaagagcccgcatcgccaagtcaatcctaagccaaaagaacaaagctggaggcatcacactacctgacttcaaactatactacaaggctacagtaaccaaaacagcatggtactggtaccaaaacagagatatagatcaatggaacagaacagagccctcagaaataatgccacatatctacaactatctgatctttgacaaacctgagaaaaacaagcaatggggaaaggattccctatttaataaatggtgctgggaaaactggctagccatatgtagaaaactgatggtttttataaatagtttcattgggatgcagctacgcccgtttattaacatattgtttatggttgctttcacactacagtggtggagttgagtagttgtgagagagactgaaaggtcctcaaagccaaaaatatttaccgcctgtggcccttgacagaaaacgtttgctgacctctggcataaatcctcaaggagagagtaagaagtggaaactcttttgtgcagttggctgtttagtagagaacagaagacattagctagaggaggaggtggtgctcctaatagtgtctcctctttcagttatgcagcatccaaagatagacaataggtaggataattgttcctttcttgcttaataaactataccaatgccctgagttgttgaattatgttgattggctttcttaggaaatataatatcacacacttttttcccattttattttattatttttaattttaaaagtaaaaaatgaccaaaccatcctaaattgtgaaagtactattaggttgaaaatactcagaaatggaaaccttcaggtaaattatatacagacaagtatatccatttagattatgcaactttctttttacagggagcatgactgaggtgaaagattatgtaattttttgagatcctaataatgaatactagtaatgcctatgtatagaggcatagttaatttaagaaaaaatatttttgttctctgataaaaattaatagctttcttttctagaatgttgagcagtacacactgtcgacttataaggttataaactattattttttgaatttttaagctaagtcatagctttttttgtccataatctgaattaaatcttttctaatatatgaagtcttttgggatgggaccagtaatatattttttcttcttatgttgcctttcccaagcctgcatccttctttggtcttttatccttctgtaacatagttaaccgtaaggctgagtgtgcattaagtcagtggtagcaatattaatatatttaatttgaatcaattaaccctttcatttacatgtataacttgagttaatcatcttttatgtttttattattattattgagtcagagtctagctctgtcgcccaggctggagtgcagtggtacaatctcggctcactgcaacctccgcctcccgggttcaagcaattctcctgcctcagccttctgagtacaggtgtgcgccatcacacccagctaatttttgtatttttagtagagacagggtttcaccatgttggctaggctggtctcgaactcctgacctcaggtgatcaacccgccttggcctcccaaagtgttgggattacaggtgtgagctactgcgcctggcctgtgtttttaatttagtataaatggtaatgagttttgtgcttatagtgaatcggatctgtaagttgaccacagttcagtttactggtttatactgttaccattttgtaattttaccgttggtgaaagattctaccacagagagtattagtccaagtcgaattaaagttcttgtaaggatgtgaattagattgacattagcattattttcttaggggagggatgccttttggccttatatcctacagtttcaaaggagtcatttcaaactctagattgaattagtggtgtagaatagatccacctcaaaaatgaactgaggccaggcatggtggctcacatctgtaatcccagcactttgggagctgaggcagatggatcacttgagaacaggagtttgagaccagcctggccaaccaacatggtgaaacctgtctctacaaaaatacaaaaattagccgggcatggtggcacacacctgtaatcccagctacttgggaggctgaggcaggagaatcacttgaacacgggaagtggagattgcagtgagccgagatagcgccaccgtaccccagcctgggcaacagagcaagactgtctcaaaaaaaaaaaaaggaactgaagcatgcttctgttctagtgaaacagtgaagacttacctgctgggagctctaattggcaacatacacagtaaactaaaattaataatgagaatataattttgtatatttggaaaagtattagtaagtacaattccttgaacaattgataggtcttaaaaaattccttacctttctattttatgtaatcttgttgatgtttgttattatttaaagttcttttctttttctttttcttcttccttttttttttttttgagacggagtctctgtcccccaggctggagtacaatggtgcaatctcagctcactgcaacttccgcctcccaccttcaagcgattctcctgcctcagcctcccgagtagctgggattacaggcacgtgccactatgcccggctaatttttgtatttttagtagagccgggctttcgccttgttggccaggctggtctcaagctcctgacctcaggtaatccgcctgccttggcctcccaaagtgctgggagtataggcatgagccaccgtgcccggcctatttaaggttctaaatttgccttgatttgggcatttttgtttgtttgtttgttttcagtttgttttctctgacaggatacatgaccatgacaaacacccagtttgcctgagttttaaaaaggatatttcgtttgccccactggaatgaccagtaaagacatacatccagttggcaaagtggaaagagggtattgatttgtttttaatcattgttctctttatgcgtatgaccaaatataaatctgatagtgacaaaatcacaaactaatacagctgcattttttggacgtcagtcagaattgtgtgtattagcccttcatttgagctgagtcacacacctcttctttttacattggtctttgtgtagcatggaatacatagcattgactctggatagtgctgtagaatatgcactgtatgagactgaataacagaagatgaattgtttctagagtgttgctataatcacaacacttcacttttcaaactatctgtacagtgtaagtgggtagtagaaaagtgatcttttatcaacagaatgactgtttgcttctgtagaagacccctgtttcattacattaccttcatatgttgtgttagaaattaatataaatcttggtcatatcagccaggacttctttggttgaaagtaaaaaaaaaaaaaaaaaaaaaaaaaattctgacccaaagtgctttaaggaagaagataacttatttgctcacataagtgaaaagttcagaattaaatctggctttataggcatggttgaatgtagggctctgtcttctgttgtgctggtttcagaatcagggtatcaggcaccacatgatggcaagatagtagtagctccaacacctacctcttttctggtttctgtccagtaggagaaagtgaaagattccttctcagacatccagactgtttcattttctgtcatgggctctgatgcgtccttgtggatgttcctgaactaatcactgtgtgtgggtgagggggatacaatattttgattggcttaggcttggttagtccctgcagttgggaatggaaaatgagagagggtgttacccaaacaacatggattgaggatggaaagagtgaatccagattaggtgaatgtaggtggatggagtcgaaggggccagtattcactaaattggctgcacatctaaggcttcagataaatcagaggggatttgatgaaaatcaagtactggacctgtaagctctaacatatgttcttcaaaaactttccttgtgaaatggatacagtaaagctgttttctaccaatttttatgacttagggaactcattggaagattgatttttcaaacatttgccattttcctgaaataatcctttgtggtgatttacaaatattagtctacttagtactttttaaaagattcaaagttcttcttccactctgcaaaaatattggaatgagttggggtgtagtaaaaagtcaatgcaagttgcaaaactctcactgtgccttagccatttcagagacaagaacatttactcactgggctgtgtaccatgcgtttgtaagcaaatgcagtgcttagatcttctttgcttcacttgttttcatacatttcctataacacttgtgtattcttttacatagccgaatgccttacatagccaaacacgaaaatatttttgattgttattatataagatatgggagtaaccatcttattcaaatttttaaaacatactgagttcattttgattgttgagaaggacgctgctagtgagtcagtcagatatttattgaatgtccatcatttattggagattcagtgaggaagacaacagatggagttcctgcactcttagagcatatagtccagtaggaaagaggaatgctaagacaaaatctagaagcagctagtgatgaagactgtgaagttctttaaggagaggtaatatagcacagtggtcaggaacaaggattctggagctggactgcttcagatcaagttctactttcctgctgttaggagactttctttggtcatgccatttaaacctctgtctcctcattcctcatttctaaaatcagggtgataatggtatccacatcatggagttttgaggaggattaagtggctaatgtgcataaagggcttagttagaacagtgactggcagagtaaaagctctgtgagcattacctctttttttttgagacagggtctggctctgttgcccggctggaatgcagtggtgccatctcagctcactgaaacctctgcctcctgggctcaaacaatcctcccacctcagcctactagctagggccacaggcgtgcgccaccacccagctaatttttgtatttttggtagagacagggtttcaccatgttgcccaggctggtctagaactcctgggctcaagcaatcctcccgccttcagcctcccaaagtgctgggattacaggcatgagccactgcacccgaccttaagtattacctgttattattaacacgtgtgcccagaattctgtggaaatgtataaatggattcctgagcttgtcagggttggctggtcaggtcacttccctgaagaaatagtctaagctgctgccttatgaacaagtaagaggaaatgggaagtgggaggcaaaagttggaacatggagagaacagagcatatttgaggaccatcagaatggcctttgcagtgtatatgtgctgtaacagtggacagttagtgcttatctaagagctaaaactcttggagctctagggtaatttgctctaggtagacgctggaaagcatggttgtatagtaacatactagtccagcgattctagaatctggctaatcatcagaaccattgggagagcattaaaaaacagcagcagaattgtgggcttcatcttaagtcttgctgaataaaaagacagaatacccctgggagatacatttttaaatcccagctgaatctagtgaacagcccaatttgggaagcactgtactagtctatggaatagctgtgtttgagatgccaaattgacagcttagttctatttgaggtaatgggaattgcatgtctgttttcaaaggaatatactcaactctttttttaaaaatctacagaatggtttcagtgccgaattcagagaagtggttgctttagttggagaactgcttagttttttctcagttttgctagtgagtttatctttattaattctcttgctttgtcttcttgcttacggacgagtgtttattataaaacataacataatctttgcataaagtaatcccaactgcaaagtttgtagtgtggaacccatagttgtaaaatacttgtttttcatagtggaagcttatgtgataggcagtcaagatgtatttttatgtctaatcctgttgcacacatgtagttaagtatatctttcaacagattacaacaatttatattttaagataatatatgagaacgtagcatttagtttgctccaagaatttagtcatcttcaaagttgtatagttttgcaaatctagcatcaaattagttaccattagataagctaagacaggccaaaatgggggaagtttttagagaactaccagtagatctagatttaccttccatagcagagttgcctaaagacattgcattttgcctaattcatgatagttgtgttagtacagacatcatatttctaaattatatgagatagaagggaagaatatttgagctctttttatgaagaggattaatatgaagtaaattatctttggaatcatgaaaactaaattattgctgtcacagactccatctagttgcgtaagtcataaccatgcctgaatgtgtgggatccagtagttaaagcaaacctcgttctactgtaagaaaaagtcatattacatctgagaggcacaaggcatttcggttaagttatattggccccaaagtacccttttgctactcagttcacttcccagttttagactcttatgtttacactcattctccttatgcaacttcctcgtacctgctgcaatttgaaattagacatagtaacagccagcacttccttgcccatattgtacatttaaattcactggttctggccaggcacagtggctcacatctgtaatcccagcactttgggaggccaaggtgagcggatcacttgaggtcaggagtttgagaccagcctgaccaacatggtgagaccccatctctactaaaaactcaaaaaaattagccaggcatgatggcgggtgcctgtaatcccagctactgggaggctgaggcaggagaatcgcttgaaccctggaggcagaggttgcagtgagccactacactccagcctgggtgacagagttagactctgtctcagaaaaaaaaaaaaagaaaaaaaaattcactggttctgtcagtggcaggtctgcaattgataagagaagctggcaattcaggtgagtctatggcaccatcacagggccctgataaatgtctgcctgtcaatgaaaggccagttgtctagaaaattcaattgaaaaaacaatataaatacagaagtcctggcagctgaaagagctgaatgagtcattgtaccatttggtcattaggtctccttcctacctggaaaacaaaatggcgaggatgaagtgccaaatggttacatcaggagttgctgtcaaggaagtggaattctcagctcctgcccagcagtcttcacatttttgtgcccattaaattaactgcaagaggggacagctcaagccatggctcttttttttttttttttttttttaaatattgcatgaaagtggtggtgtgaattgaacaatgagaacacatggacacaggaaggggaacatcacacaccggggcctgttgtggggtgggggaaggcgggagggatagcattaggagatatacctaatgttaaatgacgagttaatgggtgcagcacaccaacatggcacatgtatacatatgtaacaaacctgcatgttgtgcacatgtaccctaaaacttaaagtataattaaaaaaaaaaaagaaagtggtggtgtggaacaaaacctcccaacctttgttattgtgttttttaatcttttattgaagtataatacacatattgaacagtgcataatcttagtatacaatttggtgaattctcacaatgaacacatccttgtaactggcacccaggtgaagaaacagaatgttcccagagggcctcctcccatccttatagtcgcttctcaccacgtcccaccccaggtgaccactgtgtggccttccaataacatggattaatgttgcccattttcatacctttgttactggtttttttcatgcaacattatgtcttgtgagactcatccatgttattcctacaataacagttcttaatctcctagtctgcattcattgtaatgttttggtacttttaaatttttttatttttattttttgagacagagtctggctctatcacccaggctggagtgcagcggcacagtctcggctcattgtagcctctgcctcctaggctcaagcagtcctcccacctcagcctcctgagtagctgggactacaggtgcatgctaccaagcccgactaatttttgtattttctgtagagacaggatttcacggttgcccaggctggtctggaactcttaaactcaaacgacctgcctgccttgaccttccaaagtgctaggattacaagtgtgagccaccatgcctgacctgttttggtactttaagtcagttcacatactcatatcttattagggtgaacccaagctcattgatcttgagacaatgctatagctatagcagaatttatacttttaacctagtattagatataaattcctgaaagttagtatatattatttaggcattttgtatgttttaatggaaacctcgagcttaattaaatggtttttttttagctagtttcaggagactgacgctttaggagaatacccttcgctcccttatgataaagagtgatttcctttgcctgcaagtgatagaactgggactatgttagatctttgtgaaatttgttaaaaagcatactccagaaagggaagggctgtttgaaaggccccaggacacattctgtttctcatctggacttttctctacttgttgacttggctctgcagactggctttctccacacagtgagacacatggccactagtggctcctgaatttatatatatataaatatatataaattcactatgtttatatatatattcagtgtataatgcagcgtgacatccacgtcaccctgcattatacactgaaggctggagaaggtcatgagagatcatttcatcaaagctatatatatatattttttctgtatttatatatatatattttatatatattatatatatatatattatatatatatagttttttttttggggggacagaaacttgctccattgcccaggctggagttaaggggcgtgatctcagctcactgcaacctccacccctggggttcaagtaattcttatgccccagcgtcttgagtagctgggattacaggcgtgtgccaccatgcctggctaatttatttatttattttgtatttttagtagagacagggttttgccatgttggccaggctggtctcaaacgcctggcctcaagtgatccacctgccttagcctcccaaagtgctaggatgacaggcatgagccactgtgcctggccatatttttacgtttttgagacagggtcttgttctgtcacccagggtggagtacagtggtgcgatcatggctcactgcagccttgacctcccggactcaagcagttctcctacctcaacctccagagtagctgggactacaggtgtgtgccaccatgcctggctaatttttaaattttttgtagagctggaatctcactatgttgctcaggctgatctcgaactcctgggctcaagtgatcctcctgccttagccccttaaagtgctgggattacaggtgtaaaccatcatgcccagcctcctgaattttataagttgtaaatgctaccataagaggacagacattattttttcagttatagttcagaaaaatcccaagtacctgcctttgacctttcagctgtagtcaaagcagggaatgaggtactgtggttggtcttgcctggacctgcctttggtcagtcaattgtgttgaggtgtaagtctttatagaatcacttggtgagaaaaggacatgctgttcctagaaaaagggtatttctgggcaggccaaacactagacatccacgtcaccctgcattatacactgaaggctggagaaagtcatgagagatcatttcatcaaagctatttggaattctagaagcagattctactgactggtggctagaccacagacagtgattataatgagggccgttggagttatttgaagctctaacctgtaccaattctgaacaatttccttttggtactttcaaacttatcattcatttttcacaatgagatatgttgtcactagtgggtcctgaattttataacttgtcagttctgccatagaagagggactgacattatttttcagttgtagtaagaaaaatcccaagtacccccatttggcctgtcagctgtggtctgagcaaggaatgaggtgctatggacggaggtaccatccttagctaggtccaaaaatgtttattactctcatctatcaaagtggttttcaacctttttttaatgtagcaggacagtatttttaaatcaaaaaaggaaaaaaaatcctacatacaaagcagtagtagtacgtatttatggatccataaaaatataataaaagtattaccaaaatgcaaactaaagggctgcggaccaaattcatgactgttgtggcctctgggcagggaggatgggaagtggtattgaaaatataatagaaatttttctccgatttatagaaaaagtaatacagggctggatgcagtggctcacacctgtaatcccctcactttgggaggctgaggcaggtggattgcttgagctcgggagctggaaaccagcctggacaacatggcaaaaccccgtctctgccaaaaatagaaaaattagcaggggcatggtggtgtgcgcttgtagtcccagctacttgggaggctgagatgggaggattgcttgagtctgggaggtggaggttgcagtgagctgagatcgcatcactgcactccagcctggaaattaaaagaattaaaataattcctccagaattagccaacattgattgtatggcatttgtcgtccagcaacacaaggaggcagcagcgcagtgtagttgtaaagctgtaaagtgtgcatgctggggacccagactccttaggttctggttccaggtcctggttctgttgcttactatcctgggtgagttatttcatctttatatgctgcatttgtatagtactatattcctcatttgtatagtactatacaattacttttatatctccgaattcctactttatgtagttgtgatgtttttagaaaaaatatgtataaaatgcttagaacagtatgtggcacattggaagcactcaataaatattaactattattcatgttgttattattggggggacataaataacttctaatcatgggtattttttctcataaaaaaaaacacacatattgagagcttactgcatatcttttgcgtatctggcaccgtactcatgctactaccttgtctcatttcagccttacaaggcagttattttattgtaggtaggaaactgaagatcagcgaaataacttgattaagcatcagtggccaccaaatgattgagctggattagaaccaagctcaggaactccaaaggccctgttcttaacctctgcatttcattactgccaacacatttcttatctttcttaagcaacttccgaagaagccaggaaaaaattgcctaggatagctaaatttagcttaacaatatatgatttagaattgggaatataggaaaatatatgtagataagtgaaagatactttaaaaatttagcatttttatataccgtatttggcagtttctagtatgtgttagagaccatgctaggtgctttacagaaacgtgatgaaattcttagacagcgctgcatgttgggcattctgtgtctcctttagaatgaatcagtctcagagatattacgtatcctatgcagggtatgtatcctataaccacaaaatggcattcaagtccccacctgctatcatgccagaaactacatgcttttcattacatggaactggttttctcacatcatcagttgtttatattttacttttgaggtaggtatatatattctggattttattcatcttgtcatcttttgtttcctcatagtttagaaaaactggaggcaaacaacatgtaaaacatttaattgggtgtctgtgcaattaagtaatgcaaactgtttttgtaataatgcaaagtgtaatctttaaatgtttttagcttgttggccaggcatggtggctcatacctgtaatcccagtactttgggaggctgaggtgggaagattgcctgaggtcagaaattcgagactagcctggccaacatggtgaaaccccatctctctcactctttatttatttatttatttttttgagatagaatttcactcttgttgtctgggttggagtgcagtggcacaatctcggctcactgcaacctctgcctcccaggttcaagtgattcttctgccttagcttccccagtagctgggattacaggcacccgccaccaccacgcccaactaattttttgtttagtagagatagggtttcatcatgttggccaggctggtctcagactcctgaccacaggtgatctgcccaccttggcctcccgaagggtagggattacaggcgtgagccaccacgcctggctaaaactccatctctactaaaaatacaaaaattagctgggcgtggtagcacacatctgtaatcccagctacttggggggctgaagcatgagaattgcttgaacccaggaggtggaagttgcaatgagctgagaccgtgcctccgcactccagcctgggcaatagagcaagactctgtctcaaaaaaatatcaaaataaataaataggccgggcgctgcggctcatgcctgtaatcccaacactttgggaggctgaggcgggtggatcacgaggtcaggcaatcgagatcatcctggccaacatggcgaaaccccgtctctactaaaaatacaaaaattagctgggcgtggtggtgtgcacctgtagtcctggctactcgggaggctgaggcaggagaatcacctgaacctgggaggcggagattacagtgagccgatatcgtgccactgcactccagcctggcgacagagtgagactctgtctcgaaataaataaataaatacataaaaataaataaataaatttttttagcttttttttttgaggagaaaaatacacttatagctggcccgttaaaatatagtatacttgacaatgaaaagtaaaaaattctccattttggcttggtagactttgcccgcctttagcagtaaaattgttactctattgttggtttctagtacaatacactggtacagagtgatcactttatttcctaacacgagaattttcagggcctttcctgcctcgaacacacaccagctgtgtgtttagtcaatactgtgtttatctcagcgtgagattcaaattttcctcctaatagcattatcacggtgcaacgtcactttttgtattccttcatttgaatagatcctatacattattatggtttaaaaaataagtctaaaggtggcaatatcctaacactgaaagcagtgtatttttacttgacttattattgtgaacacattatgtcactgcacattcaagtggtgtgatgggaaatgatcaagtcttcctttttactaggtgatcagactctgagaatatgggatgtgaaggcagcaggagtaagaatcgtgattcctgcacatcaggcagaaatcttgagttgtgactggtgtaaatacaatgaggtatagtgtatggctctatcctatgctgctgtccttcctaatgttaaaatgttctgaattttatttgtctttgtttatgtggactttggtggtgttcctggaccattaagttaaattctgtccctttcctttctaattaatgattgtgactgacctgcattagcattaattggatttaagtgctcatgaaacgggcaaaataagaaacagaaattctcaaagttcaacagtgcaggcttacttgtttgttttgggaagctgccttatgtaatttttttctttattgctcttaaccctgcaattttgtatcatcttttgcttttatttctttctcactttgctagtcaggctgttgaactattgtaatttgatttttaatttgacagtccatcagtttttaaatttttctgttttatcttcctttttaagcctaaccaattttcatgcctctgtaagataagtgtccatgtgcaacttttttaaagcttcagttaaccacatgagcgtatgaatcagagatagaaatggattaaatatgtgttaatatactacagtcatgcactgcataacaacatttcagccagtgacagattgcatatgtgacagggcccgtaagatataatggagctgaaaaattcctattgcccccgaaaaccttccagcaggacaagatgtgaaggtagaagacagtgatattgataatcctgactcagtgtagtcctaaactaatatgtgtgtgtctcagtttttaaaaaaagagtttaaaaagtaaaaaaaaaaattaaatagaaaaaagcttataaactaaggatataaagaaagaaaatatttttgtatagctctacaatgtgtttatattttaagttttgttattatgaagagtcaaaaagtaaaaaaagccaggcatggtggcaggcgcctgtagtcccagctactcgggaagctgaggcaggggaatcgcttgaactgggaggcagaggctgcagtgagccaagatcacgccactgcactccagcctggcaacagagcaagactccatctcaaaacaacaacaacaacaacaaaaaactttaaaaaaaattagaaagtttatgaagcaaaaaattacagtgagctaaggttaatttattattgaagaaaggaaataaaaaataaatttagtgtacagtaatgttctaggcctttccattcactcactactcattcactcactgactcacccagagtaatttccagttttgtaagctccattcatggtaaggaccctactaccattttttatcttccatactatatttttactataccttttctatgtttagatacagaaagccttacaattgtgttacagtagcctacagtattcagtacagtaacatgctggacaggcatgtagcctaggagcaataggctgtttcatctagcctgggtgtgtactaggctgtaccacctaggtttgtgtaagtacactctgtgatgttcacgcaaagatgaaattgcctaatgccacatttctgagagcatatccccatcattaagtgatgcatgactgtatttatgtccctgaagtggtctgttgaccgtgacaaataggtaaaatgtatgctttgtttttttcccagttttaaattaattaaagttaaaagaacattgtattggcagagttctttaaataaaaataagtaaaataagttaaaatatagtatatatacaatgatattactcaatctaaacatttcaatgctgatgactatagtttcaaactcataaatgaatgtttcatattggaaaattaattatggcctgtatgttagatgtttgggaactctaaagaaagatgctgatagacatttgagagtgatttacaaaaattattttctaataactgaaacttttcttcaaattagcttaaactaaagcccaacatagtcagacaatgttaggttggtgcaagagtagttgcagtttttgccattactttcaatggcaaaaactgcaactacttttgcgccaacttaaatccattgctgttctgagttatgtggggtggactgagtgtggacccagcacttgtcctattcagccaggacctctgggttcacttggggctctagatagcagaatttgtaaagccggaatagataagagactcaccactatttgattacattcttggatatgattagatatcgtattaagaattttggtccaagagagttggaaacaatgattaatttagatttagagaacatggaaaaatttaattcatagcctttgctttttcagatgtgcctaaatgaacagacctcttgccttttaatgcctggaaaaacctcagagtatgttgaaaccctttttgtttgtttgttttttagagatgaggtctcactgttgcccaggctggtctcaaactcctgggctcaagtgatccaccggccttggcctcccaaagtgctgggattataggagtgaaccaccgcacccagccttgaaaaccttttttaaatttttattttttttttagagacagggtctcgctgtgtcatccaggctgaggtacagtggggtgatcataccacactgtagcctctgactcttgggctcacacaatcctcctgcctcactcagcctctcaagtagctaaaattacaggtgtgtgttaccacgcctggctaattttttgggtagacagggtcttgctttattgtccatgctggtctcaagttcctggcctcaagtgatcctcccacctttgcctcccaaggtgctggaattccagggaaaaccttttgaagagaaagctgggctcatttgtcagataaaatttttaatcccctatgtatttactgccgcttctaaagctgaattagaaaatccacaatgctgtttggaactatgccttttccagctgtctgtagtgttccatcgtgtacataaagcatattgagttctttttctcacaagtcatattagttttttgctattaatgtctatgttgattcctgtctatacttgttatacaacttctcaaaaatgactccttggttcatattaaatagttatcagaaagcagatgttgtttctagtaggaaagcctgcatactgtttaattgcaaagatgtcacagtttatgtttctctgaattgtttttagaatttgctggtgaccggggcggttgactgtagtttgagaggctgggacttaaggaatgtacgacaaccagtgtttgaacttcttggtcatacctatgctattaggagggtgaaagtaagttttcatcttttcttttatatgtagaataaaattatataaatataatcaatgaagtgtatattaaaaagtgttctgggtttagggattggagttactaattcttttttatatgtgtttttgttacccaattaattagtagtgaaagctaaaattaggcaaaaatatttgaataatgattgaatgaatttgggcaatgtagacattcaatacttaaggttaaataaaaatctttttctcattctttcacctccaatctgtttttcctttaatatatttttttaactatagtaattcacttttagtattatgttctttataagtttctaattagcgagagtctctactttgttgaaacagatgtaaagagatggttaattctttctttttcctaacatgataacatacatgactgttcacagatgtttgggatatagaaagttttctactctgtgaacagcagaggatgaggtaaatttttaatgatggtctcagtaaatttatctgggttataagatgacttaggttggtttcctggcttttatatttaggcaggttctgctaaatgactgtggaaaacatcttattaagtgacatctcccaatttcatccttttgtttttttacgttaaggataaaaaagtaccttattgattattttaataaggtaattatgttattcctactatttaaaaaattctaaatttttttttctttttttttgagatggagtcttgccctgtcacccagacacgatctcagctcactgcaacctctgccttctgggttcaagctgttctcctgcctcagcctactgagtagctgggactacaggtgtgcaccaccatgcccggctaatttttttgtatttttagtggagacagggtttcacagtgttggccaggctggtcttgaactcctgacctcaagtgatctgcctgccttagccttccacagtgctgggattacaggctgagtcactgtgcctggccaaaaattctaaatttttagttaagttaatattttaagtttctctggctgcaatgcaacataggagacacagtgctctgttttattttttaataaatttgtttaattggacaagttttagcagttgaaaaatatgctctatgtatattttagagtgattatgagaatgaaataaggtaatgtagtgaaagtactttgcaaactaagtgctggtcaaatgtagttatatatgtgtatttaactattaaagtgcgataagacaaacactgaagaaatgtaattgcaaaggtcaacttattaagtacattattactcatctagaagacgttacttgtctttaaacttgctttttacccttgatataattttccattagctgtaatatacaaataacgtaaaaataacttaagggtgtttttatttaacatttaaatgtttattttgataacgtgattatagcaatcatatatttgtaaaattggtaaattatataattatatatttgtactcttatatacttaaatcccttatatttgtaagaatcatttttgtttattactttgtttgcttttgctttttttgagccagagtctctctctgtcgccggggctggagtgcagtggcatgatctcggctcactgcaacctccaccttctgggttaaagcaattcacctgcttcagcttcccgagaagctgagattataggcatatgtgccaccatgcccatctaacttttgtatttttagtacaggcggggtttcaccatgttggccaggctggtctcgagctcctgacctgaggtgatctgccctcctgagcctcccaaggtgctgggattacaggtgtgagctgctgcatctggcctgtaagaatcatttttggatagccaatatgaaattgtatttaatttttccagaatagcaacattttgggaatattttattctaaataagttctaaaaagcttgagggataattttctttggagaatgtaaaaatatttttcctgaagatggatacttataaggccagaagatttttgcctcaaattatagcatatatgctttgaaaaagcataattttaagtgacagctctgactcaacttaaatttattataatgtttatggaatgatcatagaaagcagtgttataatcacagctgacttcaaaaagggttttttttttctttttttttttgtagttttcaccatttcatgcttctgtgctggcctcttgctcgtatgattttactgtaaggtacagtggtttttaatacatttcattgtgaaataccaggtaacatttgcatctttgcaacttttataagagataatatgattactcttactaacatgaaaataatctgagatgggtacatttaaatatttactaggattaatattatatttttcctgttttcgtgatccagtcacatatatgagtaaattttttctcttcaaatattagcctggctattctgtttaaaagccatcttttctaatagatgttcctatggtaacactttcctacactatagatggcatagccaatatattctaaatttagatatagaaatttggaaattgcatttcttcaggtctaattatatgagtcgtaaggctaagattgcttagatgaaaaaacaatgaacatgagtgtatgattttttgtgaatgtagatatatgaacatgtatgtgtatatatgtgcatggatatctagataagagtgtgtgtgggtgtgggtctctatttatacttccagttacagttccataccacagaggatttattttccctttccaaatttgtaactcttgacttccattttattcacaatatattttcttatgtgttaaaccctgtaatgcttagaaagtagttcagaattgcaaagccacacctttgaaaaaaacaatcttactaattagagctcagcacttgcttagagttttttttgtctttagtttgaatactatattcagaagttacttaggttaattctcctcttctctgttagagtgtggttatgttattcacttgaaacatggtttgattcctttgtttctgtttgtattcaattttagggttttcctcccatccttgttgattttgtctaggcaaaacattgacatggtttcaaaagtcaagatgtacataaagatatattcagaaaggtttccaggattttcactaaaatatatcctggaaatcattctgtatcaaagagatcattctcattctgcataatacaccattgtgtggatgtgctatagtttatttggctaccctcctatctatggacatttagcttgttttcaatgttttgtaaataaacagtgccacagtgaatgatagctttgtgttactagagaattaatgtctggtattcctagaagtgggattgctgagttaaaaggtaaacatatgtagttttgttagatattaccaaattcccatccataaggaatatgccaattttgatactcagtagcaatgtttgagagtacctgtttctctgccttctaaagatcattgattcattaaggttttccagatgtatgatcttatcacctgcaaataaaggtggttctacaccttcatttccaattctgatgcctctaattgatttttcttaaaattccctccacaaataccactaatacagtgctaaatagtttatagagaatgtctgattcctgatatgagtacaaacgcctttagtgtttctctattaaaaataagattctgactttaatgcaaattatatatgtttacttgtttgtcatactaagaaagtatgcatgaattcctattttcttgagtttttttaattaggaatgggtcttaagttttgttgaaggctttttttcccagcatttatggagataatcatgatttttcttcttagagatatggctatgatgtattatattaatggattgaaccaaccttgcattcctggagtaagtctctcacgttctttgtgtatcattttctcaccatggtgttgaattgtgtttgctaatattttatttaaagcttttgcgtcaatattcaaaggtgatattagttgcagttttctttcttttctcgttttgtttaatgtgtctgtgttttacttgcttcataaaaagaattaagaaattttcctttgtttccaaagctctggaacaacttgtacagcattgaggctatttggtctttgaatcctttgtaggattgctctgcaaaactagtggagcatggtgctttttgtggagtactttcttgataacttcatttctttcatggaagtgagtctgtttaaactttgtatctctaatgggatcaagtttggaaattgtcccttgcttttaggttttcaaatttattcgtagaggtgtctgtaaagtgggtggacacagtggctcatgcctgtattcccagcactttgggaggccaaggtgggcagatcacctgaggttaagggttcaagaccagcctggccaacatggtgaaaccctgtctctactaaaaatagaaaaattagccaggcatgatggcaggtgcctgtaatcccagctacttgggaggctgaggtggaattgcttgaacccagaaggcagagattgcagtgagctaaaatcataccactgcactccagcctgggtgacagagtgagactttgcctcaaaaaaaaaaaaaaaaaaaagtctataaaggaatgttgtaggatttcttctctttcattggttgttttactcttgttatttctgattttgtatctttaataagttctttgaatatctagtggtatgtttattttgttatttttcttcagcaggcagaattttaatttatcaattagaactacttttttcagctgggtgcagtagctcatgcgtgtaatcccagcactttgggaggctgaggcgggtggatcacctgaggtcaggagttcaagaccagcctgaccaacatggtgaaaccccgtctctactaaaaatacaaaattagctgggcgtggtggcacatgcctgtaatccctgctactggggaggctgaggcaggagaattgcttgaacccaggtggcagaagttgcagtgagccgagatcgtgccattgcactccagcctgggcaacaagagcaaaactctgtctcaaaaaagaaaaaaaaagaacttttttttttttattaatcactgcttttatttttattatttcctttttggtactttctttttgttgttctttttttcagcttcttgagataggaatttatttttattctttcattttgttaaagtatttaaggctataaatttttttctggttattattcaaactatagcccatagattctgatatataatgttttcattatcattttaaaacatttgtaagttctgtttatacttgccttttcttccaagaggtgtataataggaaattatttagtttccatatgaaaatgccttttaacttaaaaaaatttgttaataatttctacttttattgcattaaaatcagagaatactattttagtcattctgttctatggaacatattgaaatttgggggaagtggaacctaataaatgatcagtttttgtgaatgtttcatttgcagttcagaagaatgtacagtctccattttcaggctgtaaagttcagtatataatcataagcttacaaattgattatgttgtttaggccttctgtatcccttcttattattggtccacttagtctgagaatggtatgttactgagagtggtatgttaaaatctcctatcattagcaggcttctatatctccctgcatcttttgtagttttgattttatagaaacagatgctgtgtttctggtatgtagatattatggtgaattgagacttttagcattaaagaatatccttctttgtcacagttaatgctttttgtttcagttatgccttgtctcatatcagaatcattgccctcgctttcatactgtgtttactttccagatatgcttttccccatacctttttttttgttttatcatattttcaattctttcattaaattttttttttttgagacagagtctggctctgtcgcccaggctggagtgcagtggcacaatctcggctcactgcaagctccgcctcctgggttcacaccattctcctgcctcagcctcccgagtagctgggactacaggcacccgtcactatgctaggctaattttttgtatttttagtagagatggggtttcaccgtgttagccaggatggtcttgatctcctgacctcgtgatccacccgcctcagcctcccaaagtgctgggattacaggcgtgagccactgcgcccggccgattaaattttttttattatactttaagttctgggatgcatgtgcagaacgtgcaggtttgttaacataggtatatacgtgctatggtggtttggtgcacccatcagccagtcatctacattaggtatttctcctaatgctatccctcctctagtcccccaccccccaaaaggccccaatgtgtggtgttcacctccctgtgtccatgtgatctcgttgttcaactcccacttatgagtgagaacacgcggtgttcggttttctgttcctgtgttagtttgctgagaatgatgtttccagcttcatccctgcccctgcaaaggacatgaactcatcattttttatggctgtatagtgttccatggtgtatatgtgccacattttctttatccagcctatcattgatgggcatttgggttggttccaagtctttgctattgtgaacagtgctgcaataaacatatgtgtgcatgtgtctttattgtagaatgatttataatcctttgggtatatacccagtaatgggattgctgggtcaaatggtgtttctgattctagatccttgaggaatcaccacactgtcttccacaatggttgaactaatttacactcccaccaacagtgtaaaagccttcgtatttctccatatcctctctagcatctgttatttcttgactttttaatgatcaccattctaactgttgtgaggtggtatctcattgtggttttgatttgcatttctctaatgactggtgatgatgagctttttttcatatgtttgttggccacattaatatcttcttttgagaagtgactgttcatatccttcacccactttttgatggggttgttttttttttgttgattctggatattagccccttgtgagatggatagattgcaaaaattttctcccattctgtaggctgcctgttcactctgatgatagtttgttttgctgtacagaagctctttagtttaattagatcccatttgttaattttggcttttgttgccattgcttttggtgctttagtcatgaagtctttgcccatgcctatgtcctgaatggtattgcctaggttttcttctagggtttttatggttttgggtttacatttaagtctttaatccatcttgagttaatttttgtataaggtgtaaggaaggtgtccagtttcagttttctgcatatggctaaccagtttttccaacaccatttattaaatagggaaaccttcccccattgcttgtttttgtcaggtttgtcaaagagcagatggttgtagatgtgtggcattatttctgaggcctcctttctcttccattggtctatatatctgttttggtaccagtaccatgctgttttgattgctgtagccttgtagtatactttgaagtcaggtagtgtgatgcctccagctttgtaggattgtcttggctttatgggctctttttcggttccatatgaaatttaaagtagtttttttctaattctgttaagaaagtcaatggtagcttgatggggatagcattgaatctataaattactttgggtggtatggtcattttcacaatattgattcttcctatccatgagcatggattgtttttccatttgtttgtgtcctctctgatttccttgagcagtggtttgtagttctccttgaagaggtccttcacatcccttgtaagttggattcctaggtattttattccctttgtagcatttgtgaatgggagttcactcatgatttggctctgtgtttgtctattattggtgcataggaatgcttgtgatttttgcacattgattttgtatcctgagactttgctgaagttgcttatcagcttaaggagattctgggctgagacgatggagctttctaagtatacaatcatgtcatctgcaaacacagacgatttgacttcctctcttcctatttgaaatccctttattcctttcttttgcctgattgccctggccagaacttccaatactatgttgaataggagaggtgagagagggcatccttgtcttgtgccggttttcaaagggaatggttccagctcttgcccattcagtatgatagtggctgtgggtttgtcataagtagctcttattattttgagatactctccttcaatacctagtttattgagagtttttagcatgaagggtgttgaattttgtcgaaagccttttgtgcatcaaaaatcatggggtttttgtcattggttctgtttatgtgatgggttatgtttattgatttgtgtattttgaacccccatacctttatttttaaacagttttgttgaaccattttgttctaggtatgtttttgtatagagtatatattaggatctcgcttagtgaacaaatagtctttttattagaatatgtaagtttaactctttcatatttcttgataaaaatgtttagcatcgaatgtgtcatattttatgttatgattattatttgtattttatttgctatgtttctgtgtgtgatgtgcttttttgttgtgtttttttctttgacaaattttttttgacatttaggtaagtttttatatgttttagtggttgcctttggtgttacaactttttaaatgccttcataagttttctgaaaaaaattaaccgtttattgcctggttgtgagtttttcattatatttttgtgaaatcccacctatttcttatataataaccagtgaacttgttctactttcgcttttttttcccttttccatcaaattttgtttcatttatgctttgttagaacatgcaacatgtaacatatagcacatatcatatgatatatttttacttagtttctacctttgttttagtcttaagtgtataattaaatatattaagtgctcattatcagttttttattcctaagtttccctcattatctgatgcagtttatcttcaggaaatgccatagatttctcaagagggactgatgggcatagaattctcatgaactctcatatgtttaaaactatttttctgtagctttcctacttggaggatagtttagctgaatataaactccttgatttacatttctttctttgaggtttttgaaaatgctactatgtttttatcttgctttctatgtcgtttttgagaattctgatgccagtctaactctcttttacttgtaagttgtttggcaccaccccgaccccaaccatcaatcctttccctcctcctcgagaccctggggaaaaagaacccttgttgcatttcagtttttcttgctgcaggctcagtgagctctttaagtatatagatttgggtcttcttttattcctagaaagttttttgaattacaattttaaataatagttctacttaattgttttattttctgtggaactcccattatgtataaaaggactctcctttacctgtcttctctctcaggtactttctgtctgatactttttccttctatatttctttatctcattttcattcttttggttgttttcctgttgtcctcaatgcccttattatgtttttgtgtgaatctgctcttcttgggccccaatgtaattctgtgtttatttgtgaaatgattttgccttttttcttgtgtttcttcagttcagtcaggtctgtttcagttcttctgtttttgtccacttcttttctttgtttttgagttcctgatcaagggttttgttggttttttttcttccatgtccctaaatgcttgcttgaagataatttgattcagtttagaatatgttacggttttctacttcactatttttttttttgagggaagcttttgtcagatgaattgttggaattcttgtaaccatttatttgtgtatgtgtgtgtttttaaaaataaataaagacttttttgtctctttatatctgtggacagggttgatggtttgaggttggcacctttccttccttttaattttctttcacccctaaactatcaactttctaagatcacctccctgtatccagtgtactttaaaatctgtaatctaatctttattatgcctttttccagtattttcactcataggatgcactttctctttctcatgatggttttaggtcagcgttagacctagtcctagctcctgccctctctgtaccattcagtgttccccacactgtccttgccattcacacaggcttgcagctggaacaaggaagagagctcatagggattctgttttgatttttcttcttacagttaatttgaagtttggatgtgtggaagacctgaggtttgtgtagttttatttgttctctttgttgttctgtattggtttttgtaagaatacagtaacagttttggatttacatggcctcattgcctagactctcctctctcctcacttctgagtccgtattagatatggcccagtctatatagctttgtttgtataaaatgtacttctaatagaataaattacaacaatgctttgagatgtatttcatgccttaacttggttttcttgattcattcaatacaagcgggcagacagctgggaagaataatcacatggaggctcccagctctcaaaagtgtactttaaccaggcttttgtttgttttttagtattccatataaaataataagtagtgattataaagttttcagcctgggaactaacgaatggcaacacaacagaaaggaagaaactggaactgtggagctagatcactggctggaggttaaggctgtgcatgtagatttggacaccatttactcactgataattcagtccataagaatgaataagccaaagggagataagtgtagagaaagaacaaaaattccctccttcaggagggagttcatgttggaaagcaggaaggagcagcccaccaggaacaggaggaaaccttagagcatgcaatagtcacagaagctgtgggaggaggggctttcaacaaggtgtgaatggccagtaatgtcagatccaccagataggttaagcagtatgaagagagaacttggaatcttctctttttgtcgctcatggattcaaaaagatatccacatataggatctagttcttggaattcgaacacctttctggcatttgaagcaagaaggcataaactgagatgagacattaatcttttggtgatctcatatttggtattcttaacagttttaattgggacatcttaaatccatttcagtgctttgtttctgattaaagagaaaaatctaatgactactgagactttcttctcagaattgtcattttgatcttaatcctagtgactgaccactccctgttttatgtatttaagtacccctaaacaccctgtgggaaaatgccttgttctcaggaatgtttgttaagactggatgtcaactacatttctgaaaatcttgggagtatcaaaccatgctcagaatcatcatagtttttggctttcagtcttacttttctctccactgttaaatgctgagtcctgagcaaggacagggagcgggggatagatatttagtgcccctggggagggaggtggcttaggtcatggtcctgagaccagatcaaaggtgttgtagctatatttgtaagcacttggaaaaattgagatttatagttcaataataggagatctttaacgtaagttaaacagaaagttaagaagatatttgaaatcaatgatcgtgtataacttagagtccaggtttcttttattaatgtgtaatatggcaactagtgatatctgtgctcacaagctcacagggtgattacaagaaatatatgagaagacgttcttgaaaatactatgataattcttaattgcttttccccctcttcttcttcttttttttttttttttttttttgagacagtcttgctctgtcacccaggctgcagtgcagttgtgtgatcttggctcattgtaacctccacctccagggttcaagcgattctcccaccttagcctcctgactatctgggactacaggcacacatcaccacacccagctaatctttgtatgtttagtagagacagggttttaccatgttggccaggctggtctcgaactcctgacctcaagtgatctgcccaccacagcctcccaaagtgctgggattataggcgtgagcccccgcacctggccctttgcctctcttctaaagccatctttccaaccctattccctgcacattcagcaaaagatcttacctttaaaataataataataataataattgtgggactcaagcacaaattatcttaatttctaagctaggcctgcagattttctctaaatctgtacctcttcattcctcctgttatttagatcccttagacatgtgtgctgttgatccctcgtacttgttttcttcaggactttacgccgtgaagtgacctgttctccccctatatctctctatatctttagtctccaactctttagtgactttttcctcagcctgtaacattttccttcatcctgcatttgcctttaactcctctcttacatctctcttttttacttagccaagcttttagtgtccgcataagcttccattcaccagggccattttaaggtcttcactgtcccagcgtactctgtgttggaggtcttaccctggatcactagaacctataaaatggatctacatcactgattaaatagggttaattattttgaaaagatttgtggcttttgcttttgaagtgatttggattgagtaagtcacttatgattgattatgacttcttggcaatcattatgcttgctaaggaattcatgtgaagtaaaaaagaaacatccctaacctagaaattgtttccgagtggaatgaaatgtttctgagtgccaggtttatcaattagtaatgttaatttattaattttaaatttaattattttaagtttaatttaaatgttcaggtctcaggcatttttgtagacctttgaaagcttataggcataggcacttaaggttcttcctaatggcacaactagcttcagtccctccttctttactgaaattgctctggcaaaagccactagcgacctctgtaaaaccaaatccagtccacttgtcagcatttgtcatgctgaacctttttctgttttacaccgtcgatcataccttcccttctggaaactccttatcctaaggattccatgttcttttttgtttatttgtttttcttactctcctctgacccttccttcttagggttcatcatagaatcagtctccttctcttccccttaaacttggtcgtctccctttggtttagaactttttttacatgcccgttctaaatgataatttccagcccctgtgtcaggtctggcctttcttgagagccttaggcctgcatattcagctgtttctggacacaggcacctgagtgtccaaacaggaatctcacactgaactccttctttgcttgtttatctgtgttatttatctcagttaatgggaaacttatccctattcaaacaagccaaaaacctggaattctcctttttcttgaaaaattggtaaacattttcccagtacgaagtggagcattgcttcacaggcagtatatagaagcaacatcattttttttagaaatataattttaattttaacattcgttgtagctactaaattactgtttcacctccatgctaaatgtaactggaggctagtgattgcatattccaatataggattatcgaagactttcttgtaacaaggaaaataaatagaaaaggaagccaaaatcatttgaaaacccttcacttttgactatattacatgtatatatatttgtaattctcaacacatgtcgagaataagactttaatcgttctaatgcctgtgtgagtctagtctcattatttgaatgtggtgaccactgattggaaaggtcagaaaaggtgcatttttggtggatttttactccatgtgatatgagttaaatttatcctctgaagaattttaaatctgattggattgatgatatttttagtgtcagaaaaccattttaacaagaagaaaaagatttcagatataagaccaacagtaacctgtttaatttttaggactgataactatacagatactacctttagattctctggatggctaatatttgcaacacaagctttttaaatataagtttttaatttgttgcccattgttatatttaggtttgtaaatttttcaaatttaattttaaaattgtttatatggtgggtgttatatcaaaactgatgatatggtggatattttagaaaatgtaagtttcatatttctattttatgttgctatttaccaaatataatagaagctttaagacctttacctctgtagtagctcattacatttcacagaataactaatgaagatctaagaagtgatatataacatagcattggaaattgtttagtatggtttatgttaaataaaaacttcaacttttatgaagaatatcagaactcccttcagctggtggacaatatagtctatcaaaatacatcttgattctttctaaacttcactcaagataatactaaagttaaaatgtttcatagtagattatttctattcttccatgaatgttatcatcgtagattttagcatattatctttttcctatatactgtcccttaagttagttaacttctcttcctgccaagccacatttgttgtgccaaccgtgcataagcattatttgagttgtaaatgcttgtttttggtttcataccaagtagatcatttcataaacagaaaagcaaaccaggtatgtgtgacaaccaaacaaaagtaaaagctgttataattcatagtttttttcattaggaagagcagcattccgtgtcttccacattgtagcaaattctcagatatctgaagattttaattgataaagctaaaatgaccagtttagcctcagagtaacactccagtttcatgatacttttataaatattataacctttaaaacttttttatcagtggtcttaatggcctttgataataataagccagaccaagcacttaatttttttagacatatggatttgggggcaagaaaaatataaagtgaattttaatttcagtgttgtcaaactgtattcagccacagtttgcgtgatgtgagtctctctctgcctatgtcagcaacattaatgtttccaactcaactgttaagctactttttggtgacaaaattgtacaactgtactctactttaaaattcaggcatatttacagaatgtctgttatctgccagccattgtaatagacagtttgaaatgtctttttgaggaaatgataaaaatgaaggcttggagacaagtagtaacacacctaggagaaccctaagcctgtcagttttgttggtatcgtgggacatatgtagtcacaaatgtaaatagggagtactggaagatatatattcaatagagtaattatgggttggcacattcccaggtaacatagtaggaccacagactttggagccagactgccttctactagctgtataaacttgagcaagttattttaaaacttgatggctcagtttccccatccctgtaaatggagatgctaatagtacccaccacatgggattgttgtgatggttagaagagctaatatacacaaatactggtacatagtaagtactatgtaagtgtttgctacttttgtcattattaaggctagaatggatggtgacagaaggctgtctccttgggcttgaggccatttcagcgctctagtcttcaagagtgaggtaattttattttacagcagtaagagcaagcagccccatctagccttttgttgccctctgctccttggaggtgaaagagaagtacgaattggggataggaagttatctagaatcagctctgtccttccacatccctgttctttggagatatttagaaacgttctatagattagacatctattatgtagtggggtgagcatgtagacctttgagtgagtcatacttgaagtgaaaagctgactcctctatttactagttgtgaaatatgggaaatgatactgtgatctaccttgctgggatgttcagaggattaaatgaagtagtatctgtaaatactctggcacataataagagctcaaaaaactagcagatgttttaaatgagaatactagtagtaataatgtttcccattttaaaatgtaagtactttagggagagctagatattaatcattcatgccttacctagcattacgttaataacataattatattgcttacagccactgaggagctttgtgaataggaattttcattgcactgtgaaggtgaagtaggagagtgaacctagtgaatatggtgcagcatgaaccaggacagtggtcaccatacaaagttgaatatgtctgggcatttgattcaaatctgttaccagaggggctgggcacagtggcttatgcttgtattcctagcactttgggaggccaaggcgggaaaatttcttgagcccaggaattcgagaccagcctggacaacatggtgagaccgcacctctacaaaattaaaacattagccaggtatggtggcacatacctgtgatctcagctgcttgggtgctgaggcaggaggatcacttgagcccaggagatggaagctgcagtgagccatgtttgcaacattgtactgcctgggcaacagagtgagaccctgtcttgaaaaaaacaaacaaaaaaaacctgttaccaggtgaccacttctatttcatttcaacctatttagaaattttcccctaaattattatgtattacctacacacatttgttgaaaaaattatttcataaggaggcagcatgatgtaatagaaaaagagatacagcttaaaatcctgaatttgccattactagctatattataatttaattgtatattacttaatatataattaatgtaatttagttacatttaatctctcataaagtgacttaacctccctgagcctttgtttcctcagtcataagatgtactgctacgagatttaaatatcaatatatgcaaggctgttcccacagagcctggcccatatctggcactcagaattttattttttattcccatatatattcttcagactttgtacttgttgtcatgtcactgtaaatatgttcttatatttctgatcaaagttgctgaaaaccagcaaaatgacaaagacaaattatgatgtctgcagtttatttttaaatggttcagcaaaaatattccttcatatgcgtatgtgtagagagagaaagataaaacaaatgtggcaaaattttagcagttggtaaactagacaaaggacatacgggtgttcattttattctttgaggtttattgtgggttggtaattttcaaaataaaaacatttgagaaaaaagcaaactgtatttactcatgcaaaataagaccctaaaataccttctagttaatgttattatttaatgatattagtttaattgtagaataagataactagctttattatattgtgttaagtgggaaaatgatctttaattggattgtagtaaacttaaaatcttaaagcagaggatgcagaaataccttttatctttgtcacagatactctcatgggatttgcccttatctagtaagtgtcttaactttggtgtggctgatgggcttttttgatccttatgtttattagcacagagatttccacaggcagatacttctctttcttccccttccccttaaaaaaaggtcagccaaagtaaacagatagtatagttgaatatgtactctgcctcacaaacctttcatttcaactttgcctagtccccgttaccaacaaaaaaaggtcagtcagagtaaacagataagaaatgtggctgaatatgagctgccacacagcttcaaatgatcattttacctcatcttttaagatagttgtttttaattcctctacttttgttcatcaaaccataagaaatcatgtggctaatgatatgatactgattgttaacatttgcaggaactacagttaaattcttaggatgatcagagattttcaaaatgttctgtgccttcagatatcttagctagaaatgtctttgtaaccctgtcaccgttttttgctttgtgagatgggttcaccacacctcaccaataactttagaaaagcatcttaatgtagtcatctttggtttccttttaagaacgggaatatttgcattccccgatttgtgtaatccttgcaaggatattttagtactgaatttattctgtgttaataaagcacattgcctgatgacagggtaggacttgtctgttttattgttttgtccctggctcctgggatgtggatatgctaagtacatgtttataaatataagtgaatttgaattaaatgaaaaattgtgataccctttggtcactctgactgtagaagctcaaacatttgtattttaatgtggtttccactttaaatatttctgaagcagtcattaataaaacaatttaaagtagaaagtcctgttgggatgagaaatcttttccaaggagaagacttgctgttcagttgtggttaagtcagcactgactgactaatagaatgttactatttagcacatttgggaccatcgcgtttgttaactaaagtgacagataaacatttttatttttttctacaaatcaagtgtaatatgcaatatactgacacatctctaagcttcatatatctttgggttaagatacatatttatatgtatgaagcaataactcccaagtttgttgatatgttcattttttaatatgtcccgaaagagtttttccatttgacttgtttaaattagaaaattcttgtgttaattactgtcatactggaaagatcttttcatgaagtgaagtatacttttgtaagttaagtaccagatgaaaatgaaaataatttcctataaaatgaaacaacatatattaattggaaagaaacttgtaagacttttgattttaaatagcttgctttataactgcagagctttttcagaattatttgttactaacatttttctttaagaatgaaaccagatccgtgtctaattcataactgaatgcaagcacatgaataaatagataaatctaaaaggaacaaggaatgttaagccttagcttaatgcagtataagtcattgctttgaactttgaattgtgctgattagttccaacagaacatttatggactttctaaattaatttgcatcatactttttaaaaaatcctattgtgtggtttcaataaggcaactgagtagattttgttgcatgtatttgtattttttaaatgtagatactgctttttctcatttttcgtagtaggaagtcaaaagataatatctgaaaatgacaaaataaatgagctccatgagcatattctttagaaatatagagtaaaacattagaagaagcaactaaaagaatttagagtgattgcctctgaggtgaaagattgaggaagtacggcaggaagctgctgttttctgttacaaaccttgtagaattagttgactctaatgtgtgcaattatagtttttaagaaaaagataattgagcagaaaaacctgtctttccctctctccgttatttgcacacatagtaagcctatttacttagaccaactgggtactgccagtcagctggtagtagtttacacagttcccagagagcataaggatgaataatacaccctttgaggtctgtcctgaaaccctagtcaagagtgtggcaacactaaatattctaaaatggaattcttagacattggacttaatggaatgaaccacgtggagatttaaaaaaccgtaattattcatctattttcatcctaaataaaattcagcagagtcccttatctttctccagtatattatttacagtatgtgtgtctgtgcacacatgtgtaaaacagaaaccatccttagatagcttaaatataaacagggaaatatttctcagactatggggtcccccagagcccaaaggcagaagcacggtgtgcagtgtggcctatggaaggcattgaaactgtacagccgactttgtcattcctcctcctcctgcaggctgatttttttttctttttttacctcaagctttcatgtccagttacaagaaaaggaacagaattatttggtctgctctgtctctgtttttttctctctttgtcggtgtctgtcttctccccctcctcacccccatcaccgtgtccaccctctgctgaggagagagttgttaaataaaggagatccttgtaagcagtgcagacattccactacatgacagcctgagtaggtttattcataaatgcttagctgcagagatgaggacattaagtatttcatggtaatgtcactaataaatgaccaaagcataggcagctgctgtaagcttaatgattgtcaacatttaggtgtggggtgaagttctaaagcaaccccatgtggtcacattatccactggtgaaatgctcttttgctctaggtgggtgcattttggtgctaccagttacgcttcagatgtacacagactattcttatccttaagatagtgatactatttcatgagtagagttcttccagttttacttcttttttagtcaagcatttatttgaagctgtattgcaaaaattatttcatgattctttgatttgtaccagtaagcaatacacaaaccgcataggagttttgcctcttttcctttatctcctcttattgagatgtggcattcttcagaaagtcatccagcatccctgtggatctctgccataaatactctcagagcaggccttccatcagcctgatgattttctttaatttgtcagagtactctaggctttgtggtatgtggttcccgggcttaatgtttactgtgatgaagtaaagtctgcttctctaaaatactgatctgattagagttttcgatgaaatattgtgatggactcattttgagaaggaagcttaagtctagaattttatcatatgtaaccttcaaagtttgtaattgtggagtttctgggtattagtgattgagcattccaagagacacctttgaaaattgttcagtagtttttcacaattgatcatgtattcttcatttagcaggtagttagggtttttttctgttttaaactttatttttattgttattaatacaagttccaaaaccaaaaaacagtttttaatccagtcatgcaaataaatgaatgttaccatcagtaaatatttttgagtgaatgaatagtttaactctataaaattgttcaacagccctttttttttttttttgagacagagtctcactctgttgctcaggctcactgcagatcacggttcactgcagcctctacctcctgggctcaagcgatcctcctgcctcagcctcccaagtagctgggactgtagacatccaccaccatccatgcctggctaatttttgtatttttggtagagacagggtttcatcacgttgcccaggctgggcttgaactcctggccttaagtgatccacccgccttgcccttgcaaagtgctaccgggcccgaccacttctattttttaatcccttccaaaaatgttacagatcgtaaagtaataggcccatgagtccatgtgttctatagggggttcattgcaaaaggatggaaatctgagtgattatagaaagagagttgagtgatacataagttagaaagagacagcagagtagactagaggatgcaataagtgcatataaaaaatattaaaagagagaaaagaaaattcccaaagtccttgccatggtagttcagatgtattctggctcataatttccttaggatttttattgtaagtggctgactaatggactcttggcatgggctttggcttatgaaattctttctgtagtttgaagagtttaggggatacctgacttggtccatgcctatttgaactttcagggtgttaatcaaaactgcctgaagaattgcagatcctgcccacctatatttaaaattttctggcatgacctaggcctagagaaaaaaatgtatggtgccatcttttttagtagaaaaagtactagacatgatgtcaggagagtctgtgttttggggctgccatttattagctctataaccatggattgcttaatttcttggatcatattgtcttcacctttgaaatgaggattatacccattgtatatttatttgctcattcattcattcattcattcatgagtgcccataaattctttggttgaccatgtggcagacacttttatacatgcaaaagatacaaagaataggacactgtccctgaattcaaggagcttattgcctattaaaggaggatagatttgtattaagaaataaataaatgcatggaaatattatgagtactatgaatgaaacaagaaacatgagaatcttttttgatgtcttctgtttcattaatcaccaggttgtattaattcttctgcctaaataaatctccaatccatcaacttttcttcatcatcacagtcagtaccttaagtccaagctgctattacctctttttggaccactgatcttcccatacccactcaagccctcaagtccattcttctcactgtggccagagacacctttgaaggcaaagctgatcatagaccgatgttaacagtaggggaacctggctgttgaggtgtatgggacccctcttcactatcttcacaagttatctgtaaatttagaacttttctaaatgaaaaatgtttattaaaatgttttaaaataaggcaaactgaccacacaaatttaagttgctgcttaaaatccttcagtggctttttttttctttttttaaagagaaaatcccaaattcttcaaatgacctacaagacctgtttgacctggccctgcttacgtcctggaacattcttccctttccctgcgccagcctcatgggccctctggtcacacactgtcaggctccttgcagacaagcaataagctgctcttctgctgtctccctggctaactcctcaaccttcagatctgcagctcagatgtcacttcctcaggacgtcctcttaagtcatcctgcattgtcttttggggcacttgtcaattgtcattacgtttgtgttttggtgatttttaaaaacatgtcagttgatcccactgaactatgagccgcacaggagggctgaggccatgtctgtcttgcatatggtgcttagcacctacctggcacatggaaggactcatcagttgttgaatgaataactaaatgatgtgaaagtaagtgttgtgacatttttgctccttgctctaaagactactgtgcccaagcactgcaaatggagaggagtatatagtgaaatttgcttaaaatgataaaaacacaacaaaaattaatatacatgtaagacattgaaaaatagccagaacattgtccctttctcatagtaaggaaagacttacaagtaattcatgactaactcataagttgagtacagaaaaggaaaagaaagaactttaaaaaaatattttaaaccttctgctgaattcacctgttggctaaatttcaaaagtgttagtatagagatttcaaattacatttagttaaagtagaaagtaagtaatttcagcttaattgttgaaatgattttgacgttgtatttaatacagactatgatgagccaggcatagtggtacccacctgtagtcccagctatttgggagggtggagtggggagattgcttgaggccaggagtttgaggctgcagtgccctatgatttagctgtctccaaaaaaagtaataataggccaggaacggtgtctcatgcctgtaatcccagcactttgggaggccaaggtgggcagatcacaaggtcaggagttcgagaccagcctgaccaacatggtgaaaccccgtctctactaaaaatacaaaaattagcaggggatggtggcacgtgcctgtaatcccagcactttgggaggccgaggcgggcagatcacgaggtcaggagttcaagaccagcctgaccaacatggtgaaatcccatctctactaaaaatacaaaaattagctgagcgtagtggcgtgcgcctgtaattccagctactcaggaggctgaggcaggagaattgcttgaacccgggaggcagaggttgcagtgagccgagatcgcgccactgcactccagcctgggcgacagagtgagactccatctcaaaaaaaataaaagtaataataaaatgtttaaagaagagagatgtgatacagtgctgtatacttgcattgttaaagaattgtggaaccaaaaagcaaaaaataactcaaccaagacattatattatgatatacaatttaaataaaaaatgttcctagagttctgtaatatttttaatcattggaggcttatccagtatatttacttcccatgagggagattaaatagtcagtgatttcatcagcaaagagacaaaaaggcaccaagtagtatatatgctggatcaaaacaaacatttcacttaagaataatgtgccttatttgaccacttaatgatatatgatagtatgacttcttgcagcaaaaaggagctcattttacttacgcgatagatgcatgaaggcccttggatatatagcacttatgggatgtttgaatccagaagaaggttgcaaggagagaccatgcccactcccttaactgcaaacttgagaaaacttggagaaacacccactttctccctgttagcccctcctttcaactcactctttctggctggaacttcaatagagatacatagaaaaactctggaagtatactcattaaactgttaacaatggttgctaattagagagtgagaatggggaaagaaatacatgtatttcttttgttattaaaaagccattagcaattaaataataaattatagtatattgacataccgtttagcatttggttttctcaacttagtttgtataatttactgtatttaacaatatttttgatatttcactactgaatattatttttaaattatgcatattaatattgattgaaaaaattttcctgactcctgatccccttgaggtgaagaaatctgaagcttaggttgtctctgtttagtaaatcctctcaaggcaaaagctggcttcatttttccatttactgctctgggtttcagtcttgtgttggtttttactatagtgttcctcactaatgctttaatgaagttttaaggttggttatttgtttttatgtttcgtccagggtttttagttgtttttaaaatgttggtctagaaaccaggtcagccattctgttggaaatgaacctctcttagtttaggcaccataatgtatacacttggtatgttacataatttctaccagagctgtgaaatggtataatgaagtgtctttatgccattcagtagactaaccctcccttcaccaaagagtttcagcatgtattttctttgatgaactctttgcaagatgcagataaatactggatagtttttcccaggttaaaattatgtctgtgattctgtggtgtagaactctgtgaggctttgactacccattagctgtatattagagcaaattcaggtggactttttgaatagaatcacagttctcctgaatgtgtgacttccctcatcacactttcaggctgaagttggatagctgcacacatgtgtctttgtgagacatcttaattttcataaggcccaccttatcttatctcagtgcagctttgtcctaagctggctcaaaacaacagaagctgcattccaggaatttatcaggagagtataaataaattctcgttgttttgtattatccttacgttctaaaagaaaccagtttttatggtttacataaagaatatttagcgtatccattctgctgaaataaaatctaaatttcaaatgaagtcagagagctaaatacccggattacatcaaattgactttcccttagacccattcttttaaactgccctttagggtgatgccattcactcataagcagcagctgacaaagcatctgtatgtttcctcacagatgttgaggatgttcttattacataaacattgggtttcttgtcactgaactcccaagggagaatttccttctgagctttccaggagcagtttggttgtggacaccatgcatttgggtcttgattgtctccctttttcctttggctgctagaaagcttagcatcttgaggtccttccctgtcaaggacatagaacttcatggaatgtaccaatctcattgcagatgccatcttactttcctacccttaattttcctttaactcattttttgccatattaaatgcttattttaaaatcattttgagtattttttggaacatagtagccacatgcagaatcatttgattattatttcagataatgcaaatcagtgaataaccatgttttagaaatgaaattacaaaattatatgtttacttttgcttctctcaacattatcgggacccagaaaattagattttgatataattcactgtctctagaattcaaagaaacaaatatgcaaagacagtggagaccactattaggatttctgagaatgcatacagcttgttccctcatttggttgaacaggcaaattttcaaaagtaaaatcactcttcccaaatattttgtagattttggtaatctgataaatgagctatttactcattgtttctttggtacccacacagtggattatccatagcgacaacccttttcaaaacttaatagggccaactctgtatttattagggaaataataccaccaggttaaacaaactgtggctcttggttctgtgtatttactctctttcaaagggatctgttaaaccttcagtgtgccatgttgtagatcattagagaagctgaattaggatatgactctgtgatcctgaatgtgcctgccatttttatagtatgtttagaatcaaataaaaaagatgatgagcaaataaagcattagaaataaagtaccatgttatgtattgaaaacagggccaaattcttgtctgcacagtacaaatgagagcttgattatggtaaatattaccactttcagtctatggaggttaagtagaatacataatattggctcaggaaaatacatttctgtttttcttgattctaggaattatattgatgtggaatctgtaagaaaggctgtgcctcaaaaaagaagaaagatagtttcagaattacagagattttcataagagaacagatttttttcaaagaattctaattgctgttgaaatttaaattaagcctaagatctttcatgtcaattgttgagaaatgaagtcatatttaaaatcacaaaatgttagagttcatttaattcaatatccttattttatagccatgaatgcttttagaaattgctacaaaagcatactatcatctcaatgtccttgtgcaatataaaaacattttttaaattaaaacttgttaagcttctgtcctaaaaggtatactaatgggagtagaataatcttttatagggtagattgatgtagggttttttttttatatatataataggatggagtacttttttttcttattggattttttacgtagggcttaatagtggggttctgtatttatgaattggctgagcctgtttggataaaatctttgctatgtcaaatatctattttttcttaatataagttttttggtagttttagcatttaaattattcccttttatttatcttcacagattctggaacttttcaaagcctgactctcttcttgaaacagtggagcatcatacagagtttacttgtggtttagacttcagtcttcagagccccactcaggtaacggatacaatctcatgatattctcttctgcccaagttcacagccaactctgtgtggcatgcattgcttttatgaataaaattgttgccattttagctatataagctggagcgtttgagcattaaactactagggaataagaggtatcaagaaagttgacatacctttctcctcttgaaagactgatttccctgagagaaaaaggaaccttcccaggaggtattatcctaacattttaaaggctttctctaggcctctcccaacagaaaagtgacaagagaaagatggaatatggcaggattgtcgccacgggttggcaggagtcaggagcatgtggtcctgactcagctgtcccattaggcagttgagaccatgggcaggcaggtcactaccctttcaagactgtcacccttgtcttcacaccacgtgtcgaatgggaggcttctgatggagaacaagtaaaatagaatgtctgctatttaagttaataaacaatatatgtctccctttttgttctcttgaggacttgagagtagacactttggactttaaatatccctcaggtttttttttttaaaaaagccttttcattttagaaattgtaaagtcaatcagaaacactacaatatgttgagtgataaggccctttaaatacagagtgtgtgaaagaaccagcatatcaatgaaacacaaaataatatgtggaaattgtagagcatgactgtgaaattgtgcttttatgataactctcataagttaagcaaaaagaaaatcccacttcacattaatgtgttctgaaatttaaataaatatgtaagtgttttttttttcttttcttttttttttttttttttttgagacagagtttcacactgtcacccaggctggagtgcagtggtgcaatcttggctcactgcaacctccacctcccaggttcacacaattctcccacctcagcctcctaagtatctgggattacaggcatgcaacaccacacccaattaattttttttttttttgacagagtttttgctctgttgcccaggctggagtgcagtggcgcaatcttggctcactgcaaccttcgcctcccggattcaagtgattctcctgcctcagcctcctgagtagctgggattacaggcacatgccaccatgcctggcttattttttgtatttttagtagagatggggtttcgccatgttgactaggctggtctcaaactgctaacctcaagtgatccacctgctttggcctcccaaagtgctgggattacagacatgaaccaccgtgcctggcctaatctttatatttttagtagagatggggtttcaccatgttagccaggctggtctcgaactcctgacctcaagtgatccaccctcctcggcctcccaaagtgctgggattacaggcatgagctctcagcctatgagtttttcattttaggaattaaagatgtaattctgagtttaaacgattctcatttggtattagaatgttcccattaacattagaaataatcatttaaaatgacttaataggatataagagaaaaaactgaaatagtgatgagtgaaatggcattttttcagcataaatataatgtgtttcaaatgaactagttccttttctgatacatttattatagatggattttaataaaataattgtacctgttttctattttagtcttaaaaagttacagtgtacatactgaaatatggcaccccaaacaaaggatcctaagtaaatattcattcaatcctcatccttatatatttctattacctgtcctctgtgagcccagactagaacctgtggcagcagctgcagcgcctccatttcctcagctatggcgcttcctcgcccaggtctgaagaataccagatgttttctaaatcctccacacatagtaggcctaccttattaaaagcaactttgtgatgagaggacttaatcagaggacatacatccctaagtaatagattttattcaaattaagatggtgatctcaaccagtattttaaacacaaacatttgagttgtgtatattattaatttatatatttttcaaaggataatttgtattattttaattatttttatgtacagaaaactcaaccgtgtacatttaatccagtttagtggcaggttctttagcctttgccttttccagcttggcagtgtgagccacagacttgggaccaaggacattgcccccccagtgacagcagatctcatcgtgtctgtcattgtaattggtcctgatagcttccaccatcttagccaaagcccttttgtcttccgagttaatctgtgtgaaggtgatggtggtgtgggtcatcctgtgaaccagtcttgcctttcccttgacagcgcagtcagggacccccattttatgagacagggcaggcaggaagacaaccagcttgatgggatccacgtcatgtgcagtcaccgccagctgagccttcttcttctccaccaaggtggtgacggtgttaaccccagcttgaaggacaggtggtctcttagtggggacatcccctttgccaacagctttcttctcagcctgggccaagtctctgcctcttctcttgctttgtctctggtctgtattatgggccagcttatgtagttgagtagctgtttggtggtcccagggcctgggtgaactggttcatcacaggaggcacttttaggctcttgtagaggataactctttgctgctgcagcctgacatagtggggccatttcacaaagtgggtgaggtcccttttgggctggatgtcctgtccagtgccagaattcttaggcctttactcaacaggggattcaccactttcttggcctgttgcttcaagatagcaggggctggggccccgtcttgcccttggtcttctttcggcatcttgggcagctataggagagagataatttgtatatttacaagtcacatcaaactcttttctaggggagatatgaatcaagttctacatgtatctccatgtttttccctctcacttttgtcagttatctattactgtgtaatgaacaacttccaggacttagtggcgtaaaacaacaattttatttgctcacaattctgtgagtcagcaatttggaccagacacaccctagcagttcttcttttggtctttcctgtggccacccatgtggttccagccatctggtggcttaactagggccgggtggtcctattaggcctcgttcaatgtgtctggtggatagtgctggttgtcttccaggccgtgtgtctctaggtatgcccaggtctctgcacttaacagttgtgtgtttacaagagggcaagagcaaaagctgcaagtcatcttgagaattggacttggaagccacacagcattccttctgttgcaaagcaagttgcaaggccagcccagattcaaagagtgggaaatagactgtaccgtttgatgggaggacctgtgaagaattcatagtcacttaaaatctgccacactaacctgtgttggtatagtaggtggtttaagttttatttttgtttgtttgttttgagatggaatgttgctcttgttgcccaggctggagtgcaatggcgtgatctcggctcactgcagcctccgtcttctgggttcaagcaattctcctgcctcagcctcctgagtagctgggattacaggcatgtgccaccacgcccagctaattttgtatttttagtagagatggggtttctctatgttggccaggctggtcgcaaactcccgacctcaggtgatccgcccacctcagcctcccaaagtgctgagattacaggcgtgagccactgcgcccagccaagttatttttaacatactatatttatcctttagtctcataatgtgtcagatttacagattgtaagttaatttaattttactctttgatcattttttattcccttagaaagtatctttctctcacctcttagtgtctttccatctgctttcatatacctattgtcttttgtgatcttagcagctgtaggaccttgctgatgttactttaaggctctgtgtttttatatattctcagtcttaaaagagatttatctgagttcttctgtgtataattctttttctttttagcttctcctttcttagagatctgagaaatgaggtcaagggcattcatatattacaccacctttcttcttaacagaatgtaagatcttgtctttaaaagtttaaaacttgacaaataaatgtctggggtcattctttaaggataattgctgagaaatgctctatgccctctcttgttaaccaggctgaaggcatcgttttctttgaaaattttttttttctgatcatgatttgtacagttctgacattttatcttttctttcttatccttcttatttctaaattagatactctttttctttttgtagacttgtgattctagacctataatacacctatttatataactggaatttctatattagtttagaattcctgactttgtgttctgcagtatcaattctgctcttccaaatgctcagtgatgtttagtttagtatttataagctggatacaagtttacatatctttatacattcttttgggggcatagttatttattattttaatctcttttaaagtaaacgctaccactttcagatgtcgctgctgtatgtttaataagctttaatgttttcctcatgacaaaattttggaaattacatttagaagaaagaaaaaagattacctctagtttccccacttgagaaagaatctcttataccatattattatgtttcttttaaaaatctctgttttaccatattattatgtttcttagatttaattgaaatgtaaatttatattttaaaatgcacatatttttaagtgtacagctcaattagttatccagaagtgactacccctgtataaccactatccacgttgagatacagaacatcgcttgcattccagaagcctcttcccaaatctgaacccctccttcccagtggtagccacccatccagtctctgtctgtgtgtgtatttttcaaagtttgggtaaacaatcttttctttctttctctttttttttttttttttttcatagagacaggatcttgctatgttgcccaggttggtctagaactcctgagctcaagcagtcctcctgcctcggcctcccaaagtgctggcattataggcatgagctaccatgccccacctaagataatctttagtgaatgaatatctgaatctgtccatgctaggaacatgtagctcctatataatgagctttctttaaaatattaatagagtagaagtagttttgtatatttttgttttgtttcagtaaaagatgattagatttggttctgatttaaactagttctttagatatatttttatttttaattattattattatttgagacagggtcactgtgtcacacaggctggaatgcagtggtacgtcatggctcattgtagcttcaacttcctgggtgcaaacgatcctcccatctcaagcctccactcccaccctaccctactgaatagctgggactacaggtgtgcactttttttttttttttaattttttgtagaaatgaggtctcactgtgttgcccaggctggtctggatctcctgggctcaagtgatcctcccacctcagcctcccaaagtaccgggattacaggtgtgagccactgtgcctggttagatatcatttaaaaattcagctcttgttttggttcaaacctctattgccataatcttcgataccaggtttaatggttgacagtagataaaagtatttaagaattctttaatgagtttagaaaattggattttagaagatggcaagcattattggtagttaggatatttgtgtcctgttcaccttttatgtcaggtgatattttctgcatctgtcacagactagctttagagttaaaaagaacaagtgccagaagcagtcggtgtcctcaggcattagtctctgctgtttcctcattgatgctttcataattgtgtaattttttagcttacaatgatataacaagtccttgttgttttcgccaagccataaaacatttcccagttccagctctgtaggatatcagtgtgctccttagatggatggtattaggctgtgtctgctgccctctgcactacatagacaccctgatatagtttggctgtgtccccgcccaaatctcaccttgaattgtaactcccacaattcccatgtgtcatgggaggaacccggtgggaggtgattgaattatgggggcaggtctttcctgcactgttctcatgatagtgaatgagtctcatgagatctgatggttctataagggggagtttccctgcacaagcttttttttttttttttttactgctgccatccatgtaagatgtgacatgctcctccttgtcttctgccatgatcgtgaggcctccccagccatgtggaactgtaagtccattaaacctctttttcttcccattctcagatatgtctttatcagcagcgtgaaaatggactaatacataccccttgcaattatggcatcccttcactgttgacatctgcctctgatctttcattcctgaatcactcactttcctattcaatttcctttctcttgattatgaagcattgcttctgaaaacccaccaaacatactgactaggcacacttcagattactttttaaaaaacttcatttgggctcttggtcctactcaacttacctttgaagtctttctgattttacctttgaagtcttttttatttttttagtccattctccactgtatctttcctcatcctttttcagtgtcagtatctggacgtttgaccttatgttctacttactgttagaagagagttcccaggaatgagcatctttttccgtctctgtcaccccaaaaggtttgcattttatctctatttttttcccattcttccagtgggtttctaattttcttgctggtttcctcatccacatctttgcttcttcacttatccactgtttttagatcttcaatcggttcttctgttttcaaagctctatggggcttaccccactgtcctgtcacactatcagtaagttctgtttctcttctattattaaatatctagaattagtaaattgacctcttgcttttagtttctcagaatctacactctcttttaaacctgtcttcctttcatcattcaattgaagttaagcccaaaaaggtcaccagtaaactcctgaaacccgaattagccttttttcagacttttttcttatttagccatataattttgatatttgaaaaaaatcttcctgtcctattttttcaatgctaccatgctgacctcttcttccttacctctttgctacatatcttcatcaccatccctccaaaagtagatgttctccaatattcaatcttagccctcttactttggtgcaacttccccttaaagctgttgtataattctatgctagtgatacttgccctatgtatccagcagactttactgtgagatctgagtagatgtcatgcttttccttcagtattcctaacctggtcagttgattgcatttcggggccatactagagatctgggaagtaatcctagttttcctgtctcttcgcatttcctaaattcaacttggtattgagttaatgagttatttctcaccaatatctctgaaatccagacaatgcctttctacctccactgccttagataagcacttatttgtacctttaccgtggattactgcaacaatctcaaacctggtctctaagctctttccatcatcccattgattctccatgttgcctccagggagaggtttccataatgcaaatctggttttgttagtgcttgacctgaaatacgttaaaggtaggagcaaggtgagaactgccaccatcaccactgtaaatgaacatggttctaaaaattgtgtggccagttagaaataggagaaaacaaaatagaatataaaattttaaaggtagaacattttattgtcatttgtaattcatgattgtcaaattgaataagtattaaatatatcaactttaaacctattaaaaataataagagagtccaatgagaaagtcagttaaaataaatgtataacattgaataacctatagatataacaattatcagttagaaaataaaatgggaaaaattacttttacaaggcagcaactgtgtatgtgtgtgtgtgcatgtgtgtgtgtgtgtatgggtgtagtattcccaaagaaaaaaattaaaaatatacaggactccagattaagaagattatgttactttgctaagagacctttgaaaaaagactggaataaatggacagacatatcatgtgcctgcaacagaatacatttttcctattgctgtcccttttttaaggcatttgtcatccaatgcagatgctactatatttgcctcctaacctatctttctctttttgaaattcctggacaatcactcctgtgatgcttttaaaccactctgaccattaacctcttgccatactattaagtactagttttaatttgcaaatcaatccagttaaattgtcgtttttatcattgtcatctttgctcagaaaccttcaagaggaagcccattaattcccttcagtgtagagtctgaacttttaatcttgctttcaggattcagtgtaatccgttttcctttttaattttagttctcaccatcctatgtaatcctctattgcagaacaattacattttgttatttgtcatatccatgtttttacccgtttctcttgctctcctccgcctctgcctatggaaattatttctgcctttttgactccagaattaagttcttctcttccttctctcctcctcttctttccttctctgcttcagtaaatattttgtgtcaactaaatatcttgagtgctcggaaatacacagtggattaatgtcaaccacctgatacatatgtgctaaatagctattcaatgaattaatgaaaaggatttttttagtttattggtcagctctttccttgcttttgcataaattccataatgattatcataataaaccatattctctcctgtagtcactttctattgtaagctggttgagtaagtaaagcatgtttcttccttgagtcccaaatttaatatactgcagtataatgtcttggctgctttttcaaaatgtagagttaactgtgattttttttttcattctgtctgtatctttctgcctgtttctattattcatttttgctaaagaggccatgtgtcataaagataattacagtagattgaacaagtttcccaagggcaaaagcaattgtccacgaaatagagaaaaaaagggtataatgataaataggaaatggaaaacttcttaataaagtaaagctcctaatgagtcagttggaattcctgattattattaacaatcacattaaatcatttgagataagttaccttatcagttgcatgtgtaaatattttaataaagtggagggaattgatgcaattaagggatataaattcattttctaaattttacacgtatttaaagtgttgtatttccattttaatgtttccttctctaaaatccacatttatgggaccattattattgaagatgttctataatacatatgatttgatccactattggtaaatttttattatagtcttcttagtgaatgcatgtttctttactatctttggatttatgtagcatttagtccagtattttgcatataggaaatgctgaaatactggtttaatagagttgctctctggcattccatgtatgaagatgtcttaatgtatatgccatacatacctctgtttagaaattaataggctttattgacataaatttctgttcagtttttcaagctttattatatgttttgaagaaactgacacattagttcaaagcaagtaatttgtatttctgattagtgtgcttattcttataacagaaatacctattttgctgtattaaagtgaaaatgaaataattaaaaatagaacttatatggcatcttaccctattagtttagttttttttactaccctagtagatagcatcttttaaaataataagattggttctctcttcaaattttacattaagaaatataacattttgacaaaccatttttttttctgtaatgtcagtaattttaattctgactttgatgaaaagattagcatgttggtcttagcttaaaggaaattcagaagggcatagggatgaaatgtaccacagcaggggcttgtgagtaaaggaatacattttccacttgtgtatccttgggcggaagcagtagagcctggaggcccctgcccttgagtgtccacatgcacactcatactgtaagggaagagagtcaaacaagagataccccagccttcaaaaaaccctagttgggattcagaaaaaaactgcctctcgaaagattgagtttcgtcagaggagttataatgcaattataacttttaaattgccttaaaactaaaactttcagttcttcacttactcggatgtatcccactgcctagaacattttccttttttccactgtgcccctgacccaaaaacagcaacaaatgctgtctagcgggttcctcctttaagcctcagcttagatactacttccacctgaaagcaggcacttccctcacattcgattataatggccccttgcctacttttatgggaccccataattcctctatcattttacatattacgctacagtataggtgtctctttgcttacctgtctctccattacaatcaagatctgtggagccagagaccaggacccttgtgtttattgtcgtaacctgtacatacttctgacacagaggaggttcttaataagtctttgttgaataaatggatgaataggtgtatacataaattatcttttagatagctttgtaattctgaggaatatttgacaaacagttcttaggacacaaaggcaagctccctgtgaaacttctctaaatattcctgaaattaaaaacaaacaaacaaaatatatatccttcaaatcccataaaacttgttgcttttacccacatctctgacctcacacctaattggatgctttttattatgtgaggggctctctctactcaacaaaatcttgcagtgctaccagaagccattgcagtggcagtgataattaataagaggtcccctggggaccacatggcacaatagtttttccttaccaggaagttcctacatagcaaccttggagaatctagagcctctttgttagttagtaaagtgcttttttcttaccttattattattttctttattgttagcttgcttaaatttgtagaaccagatagggcttaattaacaaatagaggaatactattttcatcaatttgaattaatctattcataattctatatcattgcagttttagatctatcttaatccaattaagtatagatttatgaacatttgctgaatcagtggccttgacatttggtagttattataagtcctgaataaataagaagctggattggagagtgccgaataaggtttcagaaacataatttatagataccttgcactagaaacctaagtcttatttctctgattctcttctctccagtagcggatgcttaacatgtgggaaggcccagcacttgaaaaaaataggcatagatgagacaggggtaatttaacataatgatctttgtgtcctatggtataaaaactgaaaactgcaagattaggcaaataatggttttcagtttgccttttctatgaggcactgttttagtggatacattcaacaggtttaggttctggctgtagctctgctactctattgtgaacatgaggacagagttaacctctgaaattgtaatctatgaaattaatttgttgagccaatattcattgagttatgttctaataagacatggtccatgccctcaaagagctgaagacaactctttgtcttcagttgggaaaataagtacaatcaagtattatgggtacaatgaatgacttcatagaggagatgatacctaaactgattttttaaaaaagagacatctctggcagagcaaggcaaaggggacagaggagcagacagaaagggagggagaagaggagttattaaagggaagcgatcagtaaaggaacaagagcgaagaggcataagcagcatgcttggatttgaggtgtgagcccggtgcaatgagaaatgaaatgggaacaaccagatcttgaagagtgaggtttttaaatttaaaagtttgactaaaaagtctataatgctctctgtagcttggattctgatctcagaatattggtagtgaatgattggctatcactattcaaaattagtgatagccaagaaattacattagtcaaaacgaggtttctcttgtgtaattttcagcctttgtaataagcatgaaaggctgggaaatggagtgcaaatacttttggtcaaaagcactctcttgctacttcatctttcattttactgcctaccttgtttcttttcttcttttttttaaattgtggaaaattttgaaaacatacaaagtaacagaatcagataacgaacttcattacttagcttgaacaactatcaacattcttattttatttattcctgtactctcacacatcgtttagttatcgctaacattatttttactatttttaggtataattcacatatattgaaatttacaaatcttagatatacatttttgacaaatagatacgtctgtgaaattcacatcatcccagttattggaaactgggaaagcccccagtttcctttttacccctttccaatctcccctatccccacccttccctccaggtgagaagagtaacattgttctgactttttgtttgtttgtttgtttaccttagatgagttttgcctgtcttagaattctataaggaactcttctgtatgtcctcacttgtttctggcctcttacctgtgagcttcacccgtggtactgagcctgttagcaattcctccctttgttttgctgagcacatgctgttgtatgaatttactacaatttgttaccgattcttttgttagtgggtattttggttgttttcctttttttttagacagagtctcactctgttgcctaggctggagtgcagtggcatgatctcggctcactgcaacctctgcctcccaggttgaagcgattctcccacctcagcctccctagtagctgggattacaggtgcacaccaccacacctggctcattttatgtattttaggtagaggtggggtttcaccatggtgcccaggctggtctcaaactcctgacctgaggtgatccatctgcctcagcctcctaaaatgctgggattacaggtatgaaccactttgcccagccttgttttcgattttttgctatcgtgaatgaagttgctatgaacattcgtgtctacattgttttgcaaacatatgttttcatttttcttggacaaatatctgggagtggaattactgggtcaaaagataggtatgtgtttaacttggtaagaaacggccaaattgttttccaaaatggtggtaccatataccttccctaccagcaatgtatgtgatcacagctgttccacatccctgctgacatttggtgttgtcaatctttaattttagccataatgtgaatatatggtggtatctcattgtcatttttatttgcatttccctaatccctaatgatgttgagcacttttttatgtgcttacttttgcccatcatttttcattagattgccttttattattgagttgtattggttctttatgtattcttgatacaagttgtcaggtgtatattttatgaatattttatataactgtgtcttgcctgttcattttcttaacagtgtcttttgatgagcaaaagttttatttttgattgagtgtaacttaccaaatttttgattattactttttgtatccctaagaaatctttacttacctctgtattgagaatatattttcctttttttttttctaaaagtgttatacagtttgcttttatatttaggtctgtggtgcatctcaaattcatttttatgtgcaaagttggggtcaggattcacttttttccctatggatattcagttgttctgccaccatttattgaaaagactattttttccttttgctctttaattgttttggtacctttgttgaaagccatttgtccaagtgtggggcctatttctgaactctgttctcttcctttgatctacttgtctttatcctaatcctgcacagtcttgattacagtagtttcgtgctgagtctggaagtcagctagtgttaagtagtgcagctttgtttcatttcaagattcttttggctaagtcctggcatttccacataaattttaaaaattgcctcatccatttctattaaaaaacgagtatatagaaacacagtggttttcatatattaattttatacccggagacattgctatattcactaagtttttaatgcatagttcctgaacaccctggactttcttcccttcatgttttcctatggctctgtagatgtgaatgtccttgtcttttatgtctgcctcctacagaggtccagtgggaatgccatggcattgtgaagttgtctgacactgtcccagctggaatcatatagtccccctaagagtctctgttagtgcaccttccacactcagtcttgaatgagccattttttgaaggcaagagctttactttatcttcctctccagtcccacaatattgagcacagcatcttgttcacagtctggaacgtatcttttcgacatttatatcagatagtagggaattatgtagctgttgggtgaagtgaaggtgggggacattcttataggaaacctcagtcaattgaaatataccaattggaatatactcaatcaatgggaatcagttggaataccctgaggtatatcctaaaaagggaatatggaccttttatcaaaaacgtagccctatgttttccctattcaaaaatatgtttactagtggatgatttacgacactctaaatgacttgagtttttgctgtcaattttgaatttttgtatgtctaaatacgtttcttcttacttcatttttgttttctaggtggctgactgttcttgggatgaaacaataaagatctatgaccctgcttgtcttactattcctgcttgagatacactactttggtcagaaacagaggatgttggctgaagaactgcctaacagcaaataaattaactatggaaaacatagacattatgcttttatatgctattcagatttcaaatctttccaatttaccctggaatcagttttgagggagctgataaagactttagctgactcgttaagcctgatacataagccatatttaaaattctaagaaataattaatgttatgatatatcttgtagtatctattaaaatgtctctgggtcataaaatggattaaaatatgggagatcagtaggttatacttatatagatagtgatatatttcatttttaatttgtcatttttgatgtaaaatataatcactgctgtgataaataaactatctattgatcatttatcattttataacttcccccaaaagactgctctttctaatacattgtatatgtgaatatagtactatatataatatagatatatctgtggttcagtaacaggacactagaatatatttaatttattcttttatttagtagctgtttattgagcatctactcagtgcttgacacatagactcaatgagattctgtcaaggactggtgccatgtttttaagaacatggaatgctgtgagctaagagcttacttttttttttttcttagaatttattcacacatttttagatattgtacccatgactctataattttgtcttcccacttctctaatatcaaaatttttttaaactgtcaattaaacaaaaagttttaggtcctactaaggcttctagcttttgcccttgaaaccaggcctaagtacagctatacgtgctccttgccacctccctaagttttcttgaaaaagctctaggtgcagatgaactgaaaaaaacaaaaaaagttggttaaagaggaaaaatcagcaaaacaaactactttgcataacacttatattttctacataatattaagatatgctataaatagcaaagattataattcttaagttctttttaaagaacaaaatacgctcataataatcagagcaaaaataaactaaaatatatgtatattgtcttctttatagatttccttgtttacttgttgcagaaaaaatttaagacagcttaagatataaaaacaaaacaacagcataaattaagaagtggaaccaaagacagaaagtggaggcaagagtggggcttgagtatacatacctcaaagtcctgtaaagttactactgactgggccaaagatttgccgctaaggtttctagcttcataaataggaaatctgaacagttacacagttcagtgcctatggcctagagggcagactctgtccttgtgccaggcttggccctaccaccctgcctggcacaggcaacagaaggggctcagcatggggcctcactatgttgcccaaaactggtcttgaactcctaggctgaagccctccttccacctcaggctcccaattacctgggactatgggtacatgccacagtgcccagcttttttttggttcttaaatcagcaatacagattgcttttgagaggacccataaagaggacactgcttaacctaagtatactgcagggaacatggtgcttaaccacatccttagagttgtcacactgatgagtttgacagccttttttcttgctgcttgcctctatatgaactaatggcattacaccaaggtgtggtcagtaaaagtgggtctacaatgggtgttctctgtatcagcagaatttgtgataggccctaaaagtatccaacccaaagtagtcaggcatggtgacgtgtgcctgtagtcccagatactcaggaggctaaggcaggaggattgcttgatcctgggaagttgaggctgcagtgacccagactaaggcattccagcctaggtgacagaccttgtctcagaaaatatctaacccagataatatttacaatgaaatgaaattatttcctttccttctagaatgcaagagatttttattaacaaaacgttctatcacgtatctttcgaaacaaagacttgtaatttaaaaactaacctctcccttgatttattcttttccctctattccagggatgttagagatattcagatcattggcttcataatatataactcaggttcttggagtctatcaatatgagagtgggtgaatgcttatccagttggttccctggaactagaattggaaaactctgaggagcagacctggattctctcctgaaagacaatgtgcaagatttttgaatccttggtagctcacaagctaagcagcatttggacttcagaggatgaccagtcattctttccgggttgggaaatcagcatttgtctcctggctgctgagctcttagctttcatcttgtctgcctccccacaagctcctcctacacctgcagggaactcagttactgattgtggtcagggcaccgtgtaagatgctttatatatgttatcacttttaatctctataacatccctgcaaggtagccctccttattttcaggacaaggaagccaacgttctcaggagtcataatagcgaaaaaataatgaaacgaatttgaaatctggaatgattgaatccaaacccatggtcctgccacatagcctccttttcttaggaataacagaaattagcacactgagaaatagttaagatgtagaactctctggctgtacctgattattcctgagagaactgacagaattgagtttccaagtctcaagagctaagctgaaccttagtctggagtgaccctaccaaggtccatcacacccagggagatccaggctgagagtcagctatcctttctgcctttggcacttcttaactgtgtatcttagcaataatttggctcttccaaaaatgaactcgaattttttacttaacaggcttttccttgtatatgctgatccacttaattgttttttactttcatgttaataatattctcaaatctgtacacctaccttccccacctgggtttcccacaagcctttgcattcattttgttccaaccaaactcacttgcctactaacccagcttttactcctacacatgccttttcatttgttgtcaaaagtcaagctgttaacaaaagatccatttgggtcaagctaaagacctaaacaccatccttggtccttcccttattcccacttctccacacacatcaaatgagatcctttttaccccctcatcactgctcccttatatctcttcccctcaatccaaccaccattgccccagttcaagccatcattagcttttctctggacaattgcagcagcttcctaaatggtgtgtctgtttccagttctgtgtcctcagagccatcctcctcaacacagctgccggagacggatctcaaatgcaatctgattacatcaatttcagtataaaacctttctctgcttataggattacctatggggaaaaattcaagcttactaaccaagcagccagggtcctctggggatagcccttgcctctgtctgcagcaccgcttctcttcacacaaaaccagtgtgctcacaaattcttcatgtaagtgatgcaagttttcagctggtccatgtgcctggactgccctgctcttggcttggtaagttcttacccataatttaaaagtcacattaggctgggcgtggtggctcaagcctataatcccagcgctttaggaggccaaggtgggtggatcacctgaggccagcctggccaacatggtgaaaccccgtcactactaaaactacaaaatattagccaggcatggtggcgagtgcttgtaattccagctacttgggaggctgaggcaggagaattgctttaacccaggaggcggaggctgcagtgagctgagattgcaccattgcactccatcctgggtaacaagagggaaactccatctcaagaaataataataataaataaaaataaataaaaatcccattaaataactaaagaataagattgacaacatacaaaaattaaaattgcaaaacacatcactagcaaagctaaaagaggacataacaaaaggatatactggcaacttatatagaatgggtggttaatagccaaactttacaaagggctcttaaaaatcactaagaaggctgcgcatggtggctcacgcctgtgatcccagcactttgggaggccgaggcaggtggatcacctgaatttaggactccgagaccagcctggccaacatggtgaaaccccgtctctactaaaaatataaaaaattagctgaaggtggtggtgcacgcctgtagtcccagctactcaggaggcctagacaggagaatcgcttgaactctggaggcagaggttgcagtgagctgagatcgagacattgcactccagcctgggcaacaagagcgaaattccgtctcaaaaaaaaaaaaaaaatcactaagaagacaaccagacaaaaattggacaaggatatcaataaataattcacagaagtggagagacaaatgtttactacatttcaaaaagtttcagtcagactgtctcaatgataaatgcaaattaaaaatgagatccctttttatttttgcttgtcagtttggcaaacattaaaaatattgataatatctagtattggttaaagtgagaatactgttatatgctttgttagaaggcaatttggtaacaaatcaagattttattttattttattttatgttattatttttgagatggagtctcactcttttacccaggctggagtgcagccgcatgatctcggctcacagcaacctccacctcccggtttcagtgattctgctgcctcagcctccagagcagttgagattacaggcacgtgccaccatacctggctaatttttgtatttttagtagagacagggtttcaccatgttgatcaggctggtcttgaactcctgacctcaagtgatctacctggcttggcctcctaaagtgctgggattacaggcatgagccaccgtacccggccaaaattttaaattaccctttgacccagcaattccacttctaggattccctctctccccctttcccaaaatacctgtagaagtatggctatgtccaagggtattcattacatcgtttgctaaaacccaaatgcctgtcaacagaaaggttatactgtagaacagttattgaaaagaataagtcatttgaaaaaatatgctatttctatgtaaaaaatcactccaaaacttagtagttttaaacaacacacatttatcatctcacagtttctatggtcaggaatccagaaacaactgagttgtttgagctcaggttttctcatgacatcacagctattcacatggttatcaggcctcaattactcaaccacatgggattttccataggcagaatgtccctacaatgtggcattcggcttccccagactcaatgatacaagagaaaaaaggacatacaagatggaagtctcagtataacctaaagtcaggagtgaccgtcatcacttctgccaggttctgttagctacacagaccaaccctggtacagcgtgggaggagttaacataagggtgtgaataccaggaagcgggtatcactggagactatctagaaggctaattaccataatacgctttttaaagtaggaaattatagacaaatatatatgatatcctagttttgttatttttttaaaggaggagtttgcgtgtgtataaacatacatacaaaaaagactgaaagtttccacactgaacacagcaagctctgtgtagtaaggttggggatggtgaacactgaagagagcgcgtttacttaattataaatttgtttttcttttatgtaccacaatgagcctgtgttacttttataattagaaataatgaagtaagttttcaaagacactgtaattccttctccaggaagctttgtctgctactgctgtcaagctgatgtacttgccctcctggcgctccccccttttctgccacacaatcccactgttgctaaggatgaaggcgctgtgttcatctttaagtcctctgtggctaacagaatacttagcacaaaatacttgtactatatgtttgttgaatgaatggataaactaaaggatttatttaatgtcattaatatttattaagtagctccaaaggtgatgtgcttgagtctagacccttggtaccctgataccaataggtcaaatagctatttaacctttagatctacatttttattcatctagatcatttaacctcgctaaacatggtattcttaatttttcacaatttttaaaaggagctcatctagtatctggttttgtgggagatgggggttaaggtttttttctttccaaaagaattacatgcaacaaagtggagaaaatgtgcggttttatgcctctgtaggtttcaaatattaagctaaattgtcttgcataaatgagaagagtaagatagctgaatcagccccaaatcttttacctaatgttagtatcacaaatggatgcaattataattgcgggcagaaatgaatcattccaaaagtaggtttgtgcagccacttctttatattaataatatgcacttaggatggcttaaagcagccatgcttttattgggatagtctctagaagcagaaatctgttatttgctgatatctgtaaaaagttaattttcagagttttgaatcaatatattttgactataccacacacatacacataatttgaactggtgcttcagacttcattatttcctaaataacattaactctacaaaaacagagtcacttaaacagccaatagtgtgtaaccacaagttttagcaacaaaaaccaagggctccccagagaaccggaagcacgtgtttcagtataatgctttccagctattcctggaaagttggcaccctgggccattcacaaactttttttgagtgcccacctgtcgggagcagggacgtggccctcctaggcaccgggcacataagctggtggactggttgaccccgagctctctagagctcaccaaagtgagcatccagagccccaaatgctggcccaaatgaagggctgctgtgatgctgctgatccctgctgtaatttttttttcttcctctgttgcggtaaatcacgacttcagcactttggctgaagtgtcgcgttcagcacagaggtggaagtaagaggcagaaaacagaagaaccacgagagaaatggatcctgtctattaaggcaacgtgatgcagcgctaaaaggttaggaggttacgattcccggggctaagagaaataaactgctggtggtgaacgaaaggggtgctggagcgcagcgatctcgaacctttcccttatagccaaaccctggccaaggccacaaatttcaaatcgcctgaaaaccaaactgtctggcgcttaacggttacctcggctgagcgaaacccttggctgctgctgatttaactacaggtccgcgcgagttactttccagggaactgaattcagaacaaagagttaccgaagccttactccctctccaaaattagaattccctttttctcttagtcatataggaaacacacagttcacaagtcctgtggtgcaaaggtgtgaaccctggcccagggaggtggtgactctccccgccctccgcctgccggttgtcctgcttccgaaagcaacccacgacggtcccgcagggtgagggttccctgggatcagttccctgggatccggagaacgccacgcggagtctccctgcagggtgaggggccccgggttcccgccccctccccctctactctcccattctgcgagcgcagccagcctcccctcccacgcttcgggaagcgtcgcccccgagctcctcggttcctggtggtggctactcgtgttagtgacttcgtttctgcgcgtttgcttattttcatctttgcctcagttcgaatgtgtccccgccaccaggccccgctgctgggcgagaccactgaaccccctgaaagcttccccggagccgcgcgcataatcccgggaccctctctggaaggcgtgcggagagcggtgcgcgtggcctggcaccggaaggagccagcttccgggctccgaggcaccccctggacagcgccccgggccgcgggttcctcctccgatgcccgggcgtcgtcgccgggatcgggagcttcgggggcccgccggcaccgacggttttcgcttccctggcgggcagctggacgaggtcccgccgctgcaccgggagggacagtgggtggaaaaagccgctgcagcgccggggcgagggggctgggggcgccgtcacttgttgcgaccaataaacggcgctcgatcctgatgcgctgtttctaaaatctttagctgtgtcccgatccctccaacccaagcccctcggccaggaggaaggggcaagcgagagccgctggctctgtggggggagaggggcgccgcgccccaagagcccccgtcccgccctgcggcagccgccccggggcgcccagccgcccgcttccctccgcagagcgtcttccctgacggtgaaaccgcgcgggacacaacccaccgcggctcatcacccacttacaaatagctgtcgctaggattcccgccactcctctcagaccggcccccccgccacctctgccacttttcggagtcccccgccctcgtcactgcctccccggagctgcggggcagtcggacgcagagctgcctaaccgcaagaacgcctggccggagctgccctctgcagccgagccggcgccccctgcccttcgccgccgcgctgggcgggcgcccccgccgccctcactccgctgctcccggctcctcgcgcgcaggtcgcggagctccgccaccgctgggtgcggcgaggccggcgcgatgcggcagctgtgccggggccgcgtgctgggcatctcggtggccatcgcgcacggggtcttctcgggctccctcaacatcttgctcaagttcctcatcagccgctaccagttctccttcctgaccctggtgcagtgcctgaccagctccaccgcggcgctgagcctggagctgctgcggcgcctcgggctcatcgccgtgccccccttcggtctgagcctggcgcgctccttcgcgggggtcgcggtgctctccacgctgcagtccagcctcacgctctggtccctgcgcggcctcagcctgcccatgtacgtggtcttcaagcgctgcctgcccctggtcaccatgctcatcggcgtcctggtgctcaagaacggcgcgccctcgccaggggtgctggcggcggtgctcatcaccacctgcggcgccgccctggcaggtgagcgggcccccgcgccgacccccagccgaccccacccaccccgctccgtcgggcagagaccgcggggatcactgagttcaacgacctcacttccagatggggagactgaggcagagagagccggagagctttgagagtggtcgctcagctcgcaaaagggacttccgagacccagagagctccccagcgccccaccaagtccccctgccccctaatgtcctggcttccgaccctcgcccatgcttcacccggcatcgcccttcctgtcgccccctctcctggtcttcccctgtcaccccattctccgggagaggtgggagggccgcctgagcctgggagctggagtcctccaagcctggaccaagccggaaggagggggccgtgaacttccttgggtcacgaggggctggaatggaggtgggggatgggggcgaagctgagggttcccggggctactgcggggtgtctcgtgctgcgcagggggctgcggccctggggcagacgacccaggtgctgagcgagacgagagcctgggcagggggaagcttcactgggggccagaacaggcgttctcccccgcgcctggcccgctccgggttgcaggccactggctggggctccctctccctttggtgccccacggggcaggggctccggggtgcaggtaccacgcgcccaagtgacctcggtgccagctcggggaagccacagcacctgccccgagggcatctgcgctctccggggcctttgtcttggacagaggaagatggagtgacccggggatatggcgggaaggcgctctgagcactgagtttggctgtcgcatttgacacgggtggccgagggacggcgggcgtctgtcactcaggaatccggtgggcagagctggggcgcgaacccagtctcctttcctacccgacgcgttttccccgtgggtccccgcccacgccaacctgctgtcttctctctttttccttcccgcccgggctcggccgtcctcctcgtgcgccgcaggagccggcgacctgacgggcgaccccatcgggtacgtcacgggagtgctggcgg

SEQ ID NO: 2519 - DNA, 1475 bp, Homo sapiens
tctgcctggtctctctaaccgcgccagtgtgcctccgactcggaacggcttccgcggccggggcagcgagggccgggggcggcgggcgggatgagtgcggtgtgcggtggagcggcgcggatgctgcggacgccgggacgccacggctacgccgccgagttctccccgtacctgccgggccgcctggcctgcgccaccgcgcagcactacggcatcgcgggctgtggaaccctactaatattggatccagatgaagctgggctaaggctttttagaagctttgactggaatgatggtttgtttgatgtgacttggagtgagaacaacgaacatgtcctcatcacctgtagtggcgatggctcgctgcagctctgggacactgccaaagctgcagggccactgcaagtctataaagaacacgctcaggaggtgtatagtgttgattggagccaaaccagaggtgaacagcttgtggtgtctggctcatgggatcaaactgtcaaattgtgggatccaactgttggaaagtctctgtgcacctttagaggccatgaaagtattatttatagcacaatctggtctccccacatccctggttgttttgcttcagcctcaggtgatcagactctgagaatatgggatgtgaaggcagcaggagtaagaatcgtgattcctgcacatcaggcagaaatcttgagttgtgactggtgtaaatacaatgagaatttgctggtgaccggggcggttgactgtagtttgagaggctgggacttaaggaatgtacgacaaccagtgtttgaacttcttggtcatacctatgctattaggagggtgaaattttcaccatttcatgcttctgtgctggcctcttgctcgtatgattttactgtaagattctggaacttttcaaagcctgactctcttcttgaaacagtggagcatcatacagagtttacttgtggtttagacttcagtcttcagagccccactcaggtggctgactgttcttgggatgaaacaataaagatctatgaccctgcttgtcttactattcctgcttgagatacactactttggtcagaaacagaggatgttggctgaagaactgcctaacagcaaataaattaactatggaaaacatagacattatgcttttatatgctattcagatttcaaatctttccaatttaccctggaatcagttttgagggagctgataaagactttagctgactcgttaagcctgatacataagccatatttaaaattctaagaaataattaatgttatgatatatcttgtagtatctattaaaatgtctctgggtcataaaatggattaaaatatgggagatcagtaggttatacttatatagatagtgatatatttcatttttaatttgtcatttttgatgtaaaatataatcactgctgtgataaataaactatctattgatcatttatcattttataact

SEQ ID NO: 2520 - protein, 323 aa, Homo sapiens
MSAVCGGAARMLRTPGRHGYAAEFSPYLPGRLACATAQHYGIAGCGTLLILDPDEAGLRLFRSFDWNDGLFDVTWSENNEHVLITCSGDGSLQLWDTAKAAGPLQVYKEHAQEVYSVDWSQTRGEQLVVSGSWDQTVKLWDPTVGKSLCTFRGHESIIYSTIWSPHIPGCFASASGDQTLRIWDVKAAGVRIVIPAHQAEILSCDWCKYNENLLVTGAVDCSLRGWDLRNVRQPVFELLGHTYAIRRVKFSPFHASVLASCSYDFTVRFWNFSKPDSLLETVEHHTEFTCGLDFSLQSPTQVADCSWDETIKIYDPACLTIPA

SEQ ID NO: 2521 - DNA, 131541 bp, Mus musculus
  misc_feature (1)...(131541): n = A, C, G or T/U
gcatccacaatagtgtctgggtttggtggttgtatatgggatggatccccagatggattggtctctagattccttcagtctctgctccacactctgtctctgtaactcctttcatgggtattttattcccccttctaagaaggatcgaagtatccacactttggtcttccttcttcttgggtttcatgtgttttttgaattgtattttgggtattctgagcttctgggctaatatccacttatcagtgagtgcatatcaagtgtgttcttttgtgattgagttacctcactcaggatgatagtctccagatccatccatttgcctatgaatctcataaattaattattttaataagtacatagtactccttctgtatccattcctctattgagagacatctgggttctttccaacttctgaatattataaataaggctgctagtagagtatgtgtccttattacatgttagagcttctgcggggtatattcccaggagtggtatagctgggtcatcaggtaatactatgtccaattttctgaggaaccgccaaactgatttccacagtagttgtaacagcttgcaattccaccagcaatggaggaatgttcctcttcctccacattcttgccagcatctgctgtcacctcagtttttgaacttaagccattctgactggtgagaggtggaatctcagggttgttttgaattgaatttacctgatgactaaggatgttgaccatttttcaagtgcttctcacccatctggtattcctcagttgagaattctttgtttaattctgtaccccatgttttaatagggtgatttggttctctggagtccagcttcttgagttctttgtacctataggatattagccctctttttgatttagccctcttttccatatctgttgtttgcctttttttttttaatgacagtgtcctttgccttacaaaagcttggcaattttatgagctcccatttgtcaattcttgatcttatagcacaagccattgctattctgttaaggaatttttctcctgtgcccatatgttcaaggctcatcaccactttatcctctacaagtttcagtgtctctggttttaggtggagttccttgatccacttagacttgagcttagtacaaggagataagaatgcatcaattcacattcttctacatgataactgccagttataccagcagcatttgttgaaaatgctgtctttttttttccacaggatggttttagctccttgatcaaatattaagtgtccatggatgtgtgtggttttatttctgggtcttcaattctattccattgatatacctgtctgtcactgtaccagtaccatgcagtttttatcacaattgctctgtagcacagcttaaggtcagggatggtgattctacctgaagaagttcttttattgttgagaatagtttttgctatcctacgttttttgttataccaggtgaatttgcaaattgtcatttctaactttgtgaagatttgatttggaattttgatggggattgcattgaatctgtagattgcttttgacaagatggccatttttactatattaatcctgccaatctatgagcatgggagatctttccatcttctgagatctcttttgaattctttcctcagagacttgaggttcttatcatataaatctttcacttccttagttagagtcacaccaaggtcttttatattatatgtgactattgtgaagggtgttgtttccctaatttttttctcaacctgtttaccctttgtgaagagaaaggccactgatttgtttgagttaactttatgtccagctacttcactgaagttctttatcagatttaggagatctctggtgtaatttttggctcacttatgtatactatcctatcatctgcaaatagtaatatttttatttcttcctttccaatttgtacccctttaatctccttttgttgtctaattgctctggctaggtcttcaagtactatattgaatagggagggagagagtgggcagccttgtcttgtctctgattttagtgggattgcttcaagtttctctccatttagtttgaagttggctactggtttgctgaatattgtttttactatgtttaggtatggtccttgaatttctgatctttccaagactttggatcttttcaaatactttctcagtatctaatgaaataaaaatgcgttttttttctttgactttgataatgtagtgcattatgttgatggatttacgtgttgaaccgtccccgcatccctgggatgaagcctacttgaccatgatggataattttcttgatgtgttcttggattaagtttgtgagcattttattgagtatttttgcatcaatattcataagggaaattggtctgaagttctctttctttgttggatctttatgtggtttaggtatcagagtaattgtggcttcatagaatgaattgggtagagtaccttctgtctctattttctggagtagtttgagaagtattggtattaggtcttctttgaaggtctgatagcactctgcactaaacccatttggttctgggcttttttttggttgggagactattaatgactatttctatttctttaggggatattggactgttttaactgttaatatcatcctgatttaactttcgtacttggtatctgtctagaaaattgtccatttcatccaggcttcccgttttgttaagtataggcttttgtagtaggatctgatgatgctttggatttcctcaaattctgttgttatgtttccctttcatttctacttttcttaattatgatactgtccctgtgccctctagttagtcttgctaagggtttaactatcttgttgattttctcaaaaaaccagctcctggttttgttgattctttgtatagttctttttgtttctacttggttgatttcagccctgagtttgattatttcctgccttgtactcctcttggacatatttgtttctttttgttctagagcttccagatgtgctgccaagctgctagtgtatgctctctccaatttctttttggagtcactcagagctatgagttttcctcttagaactgctttcattgtgtcccataagtttagtatattatggcttcattaaactctaaaaagcctttaatttctttctttattttctccttgaccaagttaaggaagttaagttggggagagtgttgttcaacttccatatgtatgtgggctttctattatttatgttgttattgaagatcagccttagtccatggtgatctgataggatgcatgggattattttaatatttatatatttgttgggtctttatgtggtttaggtatcagagtaattgtggcttcatagaatgaattgggtagagtaccttctgtctctattttctgttgaaggcctgttttgtgaccaattacatggtcagttttggagaaggtaccatgaggtgctgaggacgcagatgtagctgtctcttgtgagactatgccggggcccagcaaacacagaagtggatgctcacagtcagctaatggatggatcatagggctcccaatggaggagctagagaaagtagccaaggagctaaagggatctgcaaccctataggtggaacaacattatgagctaaccagtaccccggagctcttgactctagctgcatatatatcaaaagatggcctagtcggccatcactggaaagagaggcccattggacttgcaaactttatatgccccagtacaggggaataccagggccaaaaagggggagtgggtgggcaggggagtgggggtgggtggatatgggggactttggtatagcattggaaatgtaaatgagttaaatacctaataaaaaatggaaaaaaaaaaaaaaaaagaaggtatatccttttgttttggtataaaatgttctatagatatctgttaaatccatttgttttacaatttttgttagtttcactgtgtctgtttagtttctgtttcctggatctgtccaatgaggaaagtgggttgttgaagtctcccagtattattgtgtgagttgcacacattaaaccttttaaaagccaatgtattttaaagactgcatttaggttttctttttcttttttctttttcttttttttaacagtctccaattgtgatggtttgtatatgctcagccaagagagtggcacaattagaaggtgtggccctgttggaataggtgtgtcattgtgagtctgaaaactgccaggacccggctcagttgtcccccctcaatctgtaggaaattaggggtttcagcaggtgggcatggagttgtccagaaataacaaatggacacagaaaaagggagtgctgtatctggatgtaatttttcacaaagagaacaccagtcttatataactcagaaaataaaggagtactgtgtcacagcaggcaaggtgcattggatcatctgacacaaaacagaggaatgccttcaaagggctgacaggaaccagttaatgtttacagtaaagataaaacagccctgcctagaatcagctaatgtcaggtaaggattttacaccctagtcacaatttatgctactcctttgagccttgtgaaagctagcaccagggggttctgctctagcggaccttatcatgaataatgcaataccacaactcccctttttcctaggccttggtaaatacttgcatatgaaagtaacttggctgttcttttaagtatctgtagggaatctccatttgtcagaagaattcaccaactttcttctaatatacaatatagtctactatacctgaatgtaatgaagattctaggtatacttttgctaagcctgccctgagacttctaactcttatccagtaaaatactgtaagaaagcatgcaagaccctccacaatatcgcaggaacaaatctgggacattctagctataggaatgccaaggttacaggaggctaagtttccgtgaaactctttgcctcaggactgcttccaggcttttagacctgccaagcgagtcattactggagtggatgtagcaggaaatgaatattctagcatccttcagattaagatgtagaagtctcagctcctcctgagccatgcctgcctggatgcctgccttaatgataatgacctgaaccacttgaacctgtaaggtagtcccaattaaatgttgttcttttaagagttgcttggtcacggtgtctgttcacagcagtaaaaacctaactaagacattagtttaaaagtgattatattgtgtaaagtcttagtggtttaaccattggtatttatgatcctgagagtacaatgaaatactcttgctttattgagcaaggaaatgctctgaattgtctggacatgtatgtatactttatggattagtgaatatgtctagagatactggtgcgatttagaaaaaaacaagattgattcactcactgagggttgggtaaaacattttatataaagtacttagtttgttaaggactcagttttgagagggatagatatgaaatgattgtgtttctgtgataataattctctcaattgctcaatagtgcttgtcttttaggtagttgttacagactcattatacaatctaacattgtagtttaggaccattacatttatgttggagtatcttttacatgatttaggtgtctatctcaaagcgaatctctctagggtctcacagaaaatattctctctctctctctctctttctctctctgtgtgtgtgtgtctatgtgcttgtgtgtatatgttagagggtcatgaagtaaaagataatttgattttcaggtctttcttctaggtaacaacagctcttcctggccatctggacagggtgggcatggaaggaagggaagccccaagcagatctatgtttggcttaatgatactgataaagcctatttagtcaccctggtgggcctttgctctactcatctggtgtttatttcgcctcttggttttctattttggtggtcctagcagagccaaggctgcatcttccatggcctccacaaataactgtgtagatcaacttccatttttatccttcccagaactggaagatttgcagagatagaaaaaaaataataatcacaaaacaatgatggcccctcctcaggaattcatgtggtctctccccaattcctttggcccttctcagtacagcacaaggcagggaggtaaagcaatctagacactaattaccttcccctttttgcagcatatcttctctccttgagctattctgtggctctacagctacttcttcactagccccctcagggtgtccttggcttctagcagggtctctcgccctctaacttcacaccccaaatggtgctcaaggaaagtcccagttgttttttcacactgcttaaaaggtttgaaaatttatagatacacaaatacatcacacacacacacacacacacacacacacacacacacacacacacacacacatgcacacactctctgtccatgactgaaggtggagtgaaagcctgcaatagaactgtcaggtccaggccttctctaggacagatggtgggacacacaaacagactcatgtcggcttcttgaatctctgcctcctccagtttctatgccctctccaattcttctacatttaggggtataaatacttgctcttctttcattcctctctccctacatctatctacctgaatgactactttttaatttaagctggagaatcagtgcctttcatctttgctgtggataatacctaacagccattctcagtcttaggagaatatcagtattacctagagagctttcaaaatataaattaaattagattatctggaatatgagcacaggggcagaaatgacacaaagcccctcatttggtccttatgttcagcacactgggagccaataccaacgggccaggaggatgagaacaaacacatcagtgaataccacaaaatggagaaagctaggcactaccagactaagaaacttaccttagctgtacagctggcagttttcagagtgggtacaccaaagcttgagttctgcacctagctaggatcatgaagaagagcaacagtttttgttttgtttgctagtcctttccagtctttcatcttatttttattccctgcccacatctcatgagcaccttcagcactgtgcattatggaaggcctagagctgcttcaggccagctcaccttcccttggctatagatgctatccactataccatcacctcttcagaaggagtctcacagagagggcaagaattcattgactcaatctcatgtctgtgtgttgtgttccaggtatggccactaaaaagacttgtttgcttaaactttcaagaagaattccatgattgcaagtgaaaaggagaaggaaggattacgtcttaggcattgcctggaatcacattctctcagctaagccacagcatggctgtgctttggtttgaagataaaactcaatggttatgagcactgcatggtggctcacaaacatctgtaataggatctgatgcccttttctggtgtgagtctaaagacagcaacactgtactcatattcataaaataaataaatcttttttaaaaaacccagaagttcatgtgtttgaactcttagtctctagctaatattgctgatttgagaggacacacaagctcacactgcaggaaaggaatgaggaagggaggtcttgtggagtacagccaagccacatctgtctgtctgtctgtctgtctgtctttctcctttcctcattctccctctcctccagtccctctcttcctttctgttttcttccctcccctcccttctctatatctcctttcctccttcccctctcccatccttccttctctgtctttgttttccttcctccctccttctgtctttttcttcctctttccccctctctcttcctctttctccctccttccacccagtccctctcctctcttcctggtctgctgaagtgtaagcaagcaacctcaagctttcctgatgcagccatatacacaaccactgccatactgtctctgccaccacctactgtgacccctcataccttgagacaaaattgggctcttctcccctaagttgcttcatgtctggtatctgactacagtgacagtaaaaagtaacggctatttacctagctactttgtcatccttcaagatttagaggacatgaaacacatttcctcaccagggtctgacttgaggggtctttggtggtgaacgcaggttctgcctttgcctcgcacagctctcagtgccttcactgcttcatgaaggatctgtttatccttccttttcaataggtcatgaaccccttgaaagggagaattgtgcccttcacttatagccttggaatctagccaaatccctgttgcaaggaatgaatgtccaagtcttatgattatttaaaaaaaaatggtcaaaatgttaaaggggcagtagcttaaagttttagcaatcagaaatgagccagatgaaagtaggtggcctaagatgaaaagtcaggagctatttttagcttttaacagctgggagtcaactgttgtgacttggtgtttaatttctaggattaagacgaccagaaaacctgaatagactctaaaagtgatttcatcatccagtagccactttgtacctgcctggtaactttcactaaaagtcattatagggtaaatgtcatgaaattgattacatacctatgagatcttcaacacaaaactgagaaaaacaaacagacaaaccacccaacccaaaccactggcatgctcgtgtgcatgccacaaaaccaccagtattctttctttcaagggaaaggacacccatttttgtattttatcctgtaactttgagagtaacttgggtgtggtaaaaatacgactttttgattgattaatcactatctttcctgagtgtaaatctacttgaggctctttggcagaaattacaggagatttaatataataaacaccttcaatctcaccagactcccccatctattttatagagaaagagaatgacaccctttcacgcaaaattgcaaattatgtaacaccaagcataagaaaatgctagactgtttcatgaagtttgtgagacgctgaggaaaaggaagtacgtagagactggtgggggtgacgtgtgagcgcccattcatactgttagctttccagttacaccagcagacaagccttgacacaggactgaagttttagtcttctctgaaaaggactcctacaccaatctagtgacacagcctacaggctcgggataacaagacacatgtcctattaatgtgtcttaggctccatgttcctttgtcacttttcactcggatttgcttgtaacaccaaactcagtttttcttctgcctgttggagtaaacaaaaatctcaaaatattgcagcccctaccccccacgccagcactgcccagtttcgtttcaaactagattcatgcccaacaccctaagtgcaatatagtgtgatgaactttatagaagaagtatacacattacataaccttaataaactgtgtttttgtccgagcactgtatgctcaatgttaaatgagccaattacattaagtaagggttctataaatgggcatataacaaagttatataatggtcagttgacaaaaagaatatggtactggggcgcccaggaacctaacctgactgtctccaccaggaccaatggctcagcattgtacccctgcgctccctacctccttcctgccaaggcatttgtgtcttgtgggcttctgggctatggtgttggttgtctgcgcgtttgtgtgctggaggggaagcctcccactgggtgcgcagagcggccggcaggtggcgcccgacctggcgttctcggttgcgctgtgtagcctaggtggattggaaggggcggaggtaaccagcagcggccagtggtggccgccgccagtaccccgccccctccacgaatgctcgcgacacgcgcgccgggagagggcacgggcggcggggctagctgtcttccgagctcgggaatcgctaccatctgctgctctgcgaggagtccgcgtgttctccgcggtgctcagctccaaaccggccaccatggaggcgcaggcacaaggtgggtggtcgccggtcgcccccgaggtctggtcctcagatgtacagagagactattttccttcagtacctaactttactccgggacagacagggacatcctacgcagacggaactctgcgcctacgcgcgccttcgggatcctttgcttgactcagattttgcggtggggctggggaccagggaagggctgaggactgaaaacagagtagcgggtctgcagggattgtgtccttgtctgcactatcccttccagcagtcagtgggccatacttcctcgtcctggaaggtgttcaaaggacctgttgttcaggctccggatgtctgcgctgttcttcccggggaggcgtggggagagccggatcttctggactccggccttggggctcacctcttgcagttcacaaatgcgggcgggggtgacgcggacccgagaggtggtggttttgtggagactcagtgtccctgctattcgagggctgcagcgtgggaggattggccttcaaaggcaagagagcttcacatttccccccaacccccaaccccgcccccgacatccagattgataaccctatcccagtttttcgtgttcttagaagagtcgctttcccaccccaccccacctcaccccccaccccagccgcacccagtgcctgccttaattgagggttggtcacctgctctccgtgctcagggtgttcgctggaggaatccagagaactctaggatcattcaaaataagagtaaagggatcttagaaaggatcagagattgcctttattattattattattattattattattattattattattattattattatacctaagttcactgtagctgacttcagacacaccagaagaaggtgtcagatctcattatggatggttgtgagccaccatgtggttgctgggatttgaactcaggaccttcggaagagcagtcagtttagagcaggccctttacctgccgagccatctcatcagcccagagatggtcttatgtggagtgagggacagggaggacgaaagctctcggaaattcactttggaagcagcactcagaaggaatggtttgcattaatgccatcatgaccacctttcctcgcactgaggaattttgtggtgcccttttaaatacataatgcttttttttttcttcaaatgaagtaaagagattcacgacctcatgcattctaagggcaaaagcagctcgaatgagggcagtttgggcagtgtataggactagagccactcagttggtttgctgccaggatcacaatagtctgaacagcatgaaccgtactcctctttggtcgtatcagccaaggtcccgcctggaagctgcagcttaataggaaaggagtgtgcaattaactaagcagttccagaccctggagttaggctcaaccccaaaacccaaaatggtgaacaagtccagatagatgtgtgggcagtgtgcgggtcagtggatgcagggtcactcaaagaagcattaggaaggagtaagagggattctgcaaaaacccttctggactaagaaaagttcattgaggcaggccacatggtcaaacatgcgttgggggtgagagggagtctgtggaggatgaggagactgcccagatcctgaagatgaggagtgtgtgtggctaaactgatagagcagagttctttgagaaaatctacatgtaacaaaagcttacagatggccctcaggggaagttcctgctgaccttcagcaagcagagagccttggttgctggtcagattcgaaagtcgaggtccagcaggtgcctttgtgtctgaactgaagcagatactgacaatactggagttttctgacctgactttcagactagatgcagttatttctaagtattgatagagaattgacaccaggacccttaaaaagacaccaaagtctctgctggagagagagctcagtgcttaagagcctgtactgcgcttgcaaagtttggtcttctacacaactgccagtaattccagctctagtggattggatgtcctcttctggtctctttgggtaacacacacacacacacacacacacacacaccacttacttgaaaaaatatatcaaaatccaaggatctcaagtgtgttgtatatctgcctaggacctcttatacatatccagcacactttcaatagtttttggatcatttattaaactgtcatgcaaataattatattgtatttttaaagaaaataatgacaatagagaaaagtcggtacacattcagataggtttttttcaagtattatttatctgtacttaattatgtccaagtttgaagacccccatggatatggagttaagtggactgggctgatcccatagctgtcattttggaacccctggggcctgagcctgagaatacttgaaagctatccacataattctattatccactgaggtaggaaaagaattataatagctaaaaagcacccacctgaattctaaaggctcctgaagactaagagcccgtgtaactagtttgctttatctttgagcaaatatttgagtgcttttgtcttctagacagagcattaggaacagcgaaaccaggcttgatttctatttcatgaaatgcacagcagaggatgagatggttttattaatgtggcacttacttcatacactgagatgtaaaaccaccacatgttactgacaggagagtgagctgcatacgccaatgagagaatcatagacttcagggccagttatcaatagtcaaagtagcttagtctgtttattttctccctgtctctactctcaatgctttatatgtattgattgacatcacggtagcgcccgaggaggtaagttgagctgtcttttccattttgcagaggagatgagacagaagctagattatagataaacagacattgagtaactaagttggtactgcgagcacccatcccactcagaccctggaaagataaaactcttaaccggaaagataaaagtcttaactgcctctccagccgccctgcatcactctccccttgccctcacagctggatggaactggattgaaccctaaatgggcatttgctcttagattctaaaatagtcctgtgatgtccaaggtgtaagcttctacctgtggtttacttgacagttttctgagctggaaatggttctctacctcctctctttgtgcctctaaatctaaagggaaccaaatgtgtacaagattagacctgcatctggttactagaggccccttgttgcactaaggggcgtagatatgggttatccaagtagctcagaagtgcagaagcaggtctttgaaaggcctcccgaaagtgaaattctccacacgcattcttttgctttgtgaaaatactaaattatttccagcaaaacaagaagacaccctaaggagtttggcaggatggggacagggggattatgagtgggtgagtttgtgaaaaggggctcttgaacagcactgtggagttttcaacccacaggaggccagcactgctagctgcttttcattggcccagagaagttgtccttcacatgttcctggtgaaggggtttcaaccttacaatagtgtgaaagagatgggcattcagtactgtatcacaagcttaatttttatctcagacttgtgattcagtatagtatttattatggtcttgttatgaattatctccctgtagtcttgtatatggaatgcttcatttctctatagtgattgcaatcatttgagaggtggttcagtcatgaggactgggcccttatcaaagtgttaatctgtggatggtttcataatttgatgacagtactgggagttggtgggaagtgggacccagataaggacatgggtccttgagacttttccattgaatgggatcctgctctgtttactgcttgcaatgaaggaagcaactgtgtcccacaggagctctaactgtggttagagctgaaattgctgaaactgtccattacagcccaacagcaacagagtaagctggccatgggccaaagttatggaaaccacaaacctgaataatattttcatgcaacaagttgtttcctcaagtattttgtcatagaaaggagtgctaactggcccaaagtattttgatgctagattatggcagccagctacagtttctagtcaaccacttggtgatatatgaaacagatgagcaatgacctagctacagtgagcaatggtgctaagctctgctgtttaatagtttaaattgcttcagactcttctcatgctatagcattttcagtttatgaaatatgcagcagccatttaaaaatgaaagttcctgatcccagtcaactgtttcttgatgtttttttcctcgtaattaaaataacctcattgttatgtttctcagggtgttttatgtttgcttttatcttttgttatttactgttgttttttatttgtttgttttgggtgtttttgtttttgctaaaaggaaaaccttgctgttgtttaacctttgcatatcaaattactagtggctttagcttcctatggcttacaaattgctgcaaacattgcagctgaaacaatacaattctatagaccagagagacatagtgactgagtcaacagggcatgtctatgaatccatgctgaacctctactggcttcaggtgtccgaagaagtcttgtctggtagaggtaccgatctctgcttctgaggacgcaggtgcagcatgtcccccattctaacttataaaaatttgcactggcattaagggctcacctggctaaacctggctaaattacacagctcaagagcctcaaattagccacatttgtaatgataactttttcatattcattaatatttgcaggtttttgagtttagaattattcagtctactacagtattgccatttttcagttgaccacttagcccaggagaatgctaaaagtccatgaatgacatgaaataataaatactggattattcctacctgtttccaaatcctattaagacaacagtgtcttattgacttactcaagactcttgtgccaggaaggacttacaacaacagtttatatggatatagataaaacacaatgggtcagtataaattagaaacgaatgaaaggaaataaagaaggatatgaacagaaaatgagggcaggaatgatgatgatatgtgacatatacacagttgtatagtttttacttttcagaaagtgagtaaaaacttttttatagcattcatttattttatgtgtgtgtgagtgcatgtatcagaggacagctttcaggagctggttcactcctttgaccatgtgatctccaggggctgaattcaagtcatgagacttgctggcaagtacctttatccattagtcaatgatctagttccccaatgagtgaggatttgctttgtaaacaactgtgccattttattatagagtaatttcttccttccctgctaaataacaaaaggcttctatatgattagattacattaggagaaatttaactttttattcaaaaatttcatttcatttcaggcaataaaattgtaagtttagatcaatggaatttaactgttaaattttgtaaataaatttatttatttactgttgggggatgcatatattgtacagtatgcctgtggaggtcagaagacaatctctgggaattggtactcctactatgtagattctagacatccaactcagtttaccaggcctggtagcaagtacttttactgctaaaccatctcatatatgtatatggtcatattgcatattcttgttgaaattcaagaacatgataatacagatcctgtagacagatgcaacccatcttaaattgttctccataacatttacttagtttcttaatattctgaataaacagacttacaaatttcttccaaaaaacccctataaacagagagtccattttggcagataagctaaacattctatagcagctaatgataataagcatttcagaaaatattgatttggttatgagaagcttgaccagatcctgtctaatagagatgcgaatgctcgcagccaaccatcagactgagcacagggaccccaatggaggagttagggataggactgaggagctgcaggggccttatctggcatcaatgggagtggaggcccttggtcctgtgaaggcttgatgccccagtgtagaggaatgctagggcagtgaggtgggggcaggtgggtaggtgggagagcaccctcatagaagcagggtaagggctgtatgggagagggggtttgcagaggggaaactgggaaagaggataacatttgaaatgtaaacaaataaaatatccaattttaagaaataaagtagaaacttgctcttttgaacagaaaaaaactattaatttggttaaataaatattccataaaatatgtattgattgtgctagtaataatacatatggcaaacccttggctccagtaggcattggggcatctgtagttgttatgatcctggaatcaaggaaacctgtccaaattttaattctaccaccctaaccttaaaattcagctgattctggtgacgtactggtttctctgggcctcagtttcttcacatgtggactaaatataataggtctaatgtgctagggacctgaggaagcttcagtgagttaacttatgcgaggcgtttgaatggtgctctgtacgtggtaagcactgtgtaaatgttttttgtggcctccctcccatgccaagacctgcctgtgcattcagtatcttatggaaatgtgtagtagcactgtaaggtagggatatttagttttaactcatttgcatacaggaaaactgaggtcagaaatgaagtaaaaaagacaaaattaactccagttctgctgaacatgcgctttcctggggcactccactgtctctcagtatggattcaagcacgctccaaagcttatagaaatgagaggtagcagagttaagaattcatcaccatgagtaatagttcatagagcaaaaagatggcttatttccatcccaatggaatttttagaactaattcacactgaagctaataatattttagacttgttatgcccagttctgcaatgtacacgctgaagatgagccattgtgttattaaaaagttgtagaaaatatttaatctcaatctgaggcttctatcctgtctttgatcattcagttcctggataaaagatacacaacttttattatttacaataagccttaattagcactaatgctggacagatatctacccactatgctattagaatctgctttcttaacaataaccccgagttttacttactatggctaatctgggctgctcttaactcttaactggataaccctctttggccatgctttcttgactcctaacccatgttatcttctctttccaccttctttttttcctcatggtctactctgaactcaaggcctgtaacaagaagcctatctcaattctgcccagcaataggctgtagacatctttattcaccaatcacaaataacttggaagcaaggttacatagcatcacttgagtctatgtggcagactcatctctggagcaacttgggtcttgggggcctgcatttagtattaaaatatatagcaacagaccaaatctcaacaaaaagcatattcaacttacaaggatggtaatactgctttcattttctaggtaaggatatagaattacaggatggttacttaactgtcctcatctcaggaaacttttgaagtgttggagtgtgccaatgtggatggagaaatttcacagggccctacttctagctgaagaaatacaggaaatacaggaaatcaatggatgctgagaggctgagaatcagttctcctctaaggatgagcactcagtggaatgtgtgtatatatatatatatatatatatatatatatatatacatatatatatatatatatataaaatgcaaaaattttgaaaggctgtgaaagacagacaggaaaggagtgggaatggggagatgtacaaatggtttagatacagtcacaatgtatgaaattctcaaaatatttttgaatttaaataaaaaatgtcagagcctggatttgaaatgagcttgagtctgtacccgaaggtttagttactttctgaaccatcccctcatgttggcatgcagaacagtcagccagcgcaccaaattgcaatagtgaactcactttgtagtccgtacactcagagcttttgaagggcagaagttaattgcactattcgttctgtatctgtttagggcctaggtcatagaatctaaaggtaatttggtatccctgagacctctgagaatattcttcataatatggctgaggttatcagcttattgcccgatgaaaaattctgttaaatcgcccagtacgtgcttcacagaaatagtacagaatttttaccactagatctaggaatagtcagtttaaatagtttaaatgttccatttctttatctaagaatgtcagtgtttttaaattctctctctctctctctctctctctctctctctctctctctctctctcgtgtgcgtaaatgaatgtatgcatatttgtgtgtgtgtgtagcccagcagtcttcctctattcactgtattttcaaagacagacctcaatgtatgcagatggtcaccattacagctgtttcggaattctcaaaattattcttggaagccannnnnnnnnnnnnnnnnnnnnaaacacactgagttatgatacagttaagaacacagggaaaactgaaggtgtaatgtagagattccaagcatgccatttcatgctgtagtctatcaaatgtctacaaagtattatgtaatttacttaaaatatatccattcaattaacaattattacaggggctggagagatggctaagtggttaagagagtactgactgctcttccagaggtcctgagttcagttcccagcaaccacatgatggctcacaaccatctgtaatgagatctgatgtcctcttctggtatgtgtgaaaacagctatagtgtactcatataaattaaaaaaaaaaaaaaatgtaccagggaaggcagggtttctccgtgtagccctggctgtcctggaactgactctgtagaccaggctggcctgcctctgcctccctagtgctgggattaaaggcgtgtgccaccaccgacctgcaggcaacaaacctcttgatgcatctgaataaagctgaagctaaaaggaagcttcctgtctttcaataacaatacattgtaaagaggttctcatggtgtgtttggtatataaatgttgcactttgatatataagaagtaaaattcccagaataaaaccacaaatgaacaatactcttagtcatcaacaaactgtttctattttgcaagcgacaaaactggtactttactgtaaccagaaaatatacttgaaaatgtgtgagagcgtcagacctgtctccaaagttgccggtggttatttataccctagacaaactgcattttctgtgacatagatttaaaatgtgggatcctcttcaactcctgggaaattgcaaaatagggttttctttcagttagaattgttttttccctgtgggtttgatagcaagggcatcttctcaggggatctaggaagtagaatcaattcgtttgaaaggaaaggaaattttgagatgaagggagtgagagggagtgcttgcagatagctctgttttagagtctgggttttagttttgtttttgtttttgttttagtttttcttttacacatacacggactgagagcagcaatggtaggagctacaaccagacaaacagacaaataaccaccatactgtataattctcaacattccagcttccaaaacagattcctttctacataatgacctcacagggcaggccaggaggaaaatatagttgctgccccctgttgtttctctttaactgctgaaggatttcaggacattctaggatatttatgttgcctgcaaagtttgtttcaaacaactggaagagattcaagggttgaaaggagtgagagacatggtattttgaattcacttgtttataaagttgtttatctccttccttaagagatctgagcaagaatattaattatatcaaggactactcctttatatcttaccatccagcatcttagatgtaaattgagattttgataacctttttctagtaggagaaagtaaaaacccattcatatctagcttcatcccatgtttagtatactcactattgaatctacttgattgcagcaactgaagaatttgtaacatgaaaataggcacctgcatcgcagaggtctgactgtggggtagacacagagctcagagccattgttctgctgactctggactagcacagagcatgtcacccattcccctcagatgaagccctaaagcaccagatagaacaacacttgtcttctcagatactgagagatgtctaccttggcagagctttgttctagttctgtcctcagaattcagtgtttcataatagtttcctataataattacaaatttggtttctatttgatttggaaataaagaattagtacctgtgatggtttgtatgtgctcagcccagggagtggcactattagaaagtatggccctgttggagtaggtgagtatgggctttaagaccctcatcatagctacttgaaagtcagtattctactagcagccttcatatgaagatgtagaactctcagctcctcctgcaccatgctttcctggatattgtcatacttctaccttgatgataatggaccaaaactctggacctgtaagacagccccaattaaatattattcttataagaatcatcttggtcctatgttgcggtaaatctctccaatccagttatgcccccgcaatgaaaacacaacacaattaatatgaatacatgctgtgcgcctagattgggcagacctaccactacactaccatcttctccatctaagagaccccttagaacttgtggtttctccaggccttgtgcttctgctctgcttttcttcttcctcctcctctgcgttctctctctctcaaacctccttctttttttttctctctttctgctccactttcccttttatctgaccaataagcagctctcctttattttacaaattaaggtggaaagaaggtttagaggaaatcacctgagtgctgactcattccttgttcatagcctctcacaggagaatggaattgacatcaaatataattagccccagggctatccacaacactttccattttctgtccaattaaaagactattttatcttagatataaatgaacataactattacagttttgtaatttataaagtacaagagacctaacacccagtccaccatctttgttaattaaacagaacctctgtcatctatccttacttaaaagacataattctacatctggctatggcttggctttagattgaatgccatctggaaaccatcctcccagagctgttcttctcaaagcaaaaaagcctgggttgactaggagattatgtagttttccaaccccatcagaaatacaagaactactgatattaactgaaaatatataggaagcctaacccagcttccaaaacttagtcaatgtatagagactactgatcacttggacagtcccttacttctacacgttggaacatccgtctttagcctactggccagggtcatctgacagacttagagaaataggaatactaaggactagcctactctgcctccacagaatcaagctgtcctagcctgtaattgtgtcctttctttggacagtaatatatctgtagatgaaatgaggcagttcttgcttactggctgtttcaccacaactggagtaacacaaagctactcagtttcttctttgaatccaagacagggaaatctgtcaggagcagactagcctcaacaacaagtgaataaataacattaaatgtcacttctgtggacttctggtgtttttgaaaactaactatctatgtaaagcaatctagtctattctctgttacctattctcagctgtttctgactaaaataactgaaaacaccctaacaataatcttagagtcatgaatttcctatttgggctttaactcacaggcttaaaatctcagatctgtttctaataacagcaatagaaggacttggccttgtacttcaaattttttactatcgaagacaacctataataaccaccccagccccaaagcccggggaactggaataaagactcttcataacttcttcaagctgattatggacattgaggtatttttgaagagaggggggaaggtagggaaaaatgggggaattcattggccttaggaaggccacaccaatgattgtctctgatgtctgtgtcctgactggatctggatgaaaacccaagacatcaggagttcaggcaggtccgttcagcatgtctgatgatgaaattcaccaaggctgtatattctgtaatatataaatctaaaaacaaaacatcaatatcatcaaataacctttttgttttattctctggaatctagttcttcacggggtctccttctatcaaatctgatccatatgactctggaagtgtaaatactttaattaccttttccaaaaatacaaagacaaaccctttccttaaattagcatatccttcaactggtaaccaggaaaacctgtagcttgccctctgtcccagaggaacaataaaacaaccgcaatactcaaaatcacacacattttagcctatttagacctttctaatttgtcatgtcaggattttagcccaaattcccttggagtccacattagagaatatgagtctcctgtagactttattataccatctttaagacatttgattcacacttctatctatacctgcttatgttagaatatgagtatcctgtaagacttattagagcaatatatcttgataccatctttaaagcaattaattcaaacttccactaatatctgttataccctctatctgttgtgttctctacaaggagccacagacatttatttaattaatacctattataatatctatctgttatgctctctacctggagccacagacttctatttattaatacctgttcatagcaggtgattatcactgctctctacttggagtcagtgactaatattccctgtctaggtctgaaccacaggtgaaatttcccatctttaagtactatacctgcttataagaggcagcttgtcaaacccaaaattcccatggagcccacattagacagaatgagtatcttgtaagacttgttagagcaatatatctttatatcatctttaaaagccttgacttagccttgtctagtctcagaacatctgtttttgaggtagtgacatttaattgtcctgaggaagagaactcttcatgtctggcattggggcctgagagaacccccacccccacccctccgggaggttttttttggcacagtgttgtcccatttgtttgtggctgctctacattccctagttaaatgtcggcctctggcacacatttaacatattccataaggaataggtccccctttggtattactttggtttttcctgcaatcctttctgagatgaccttgatcagcacaattaaaacatctgaaatcttgggtgtttggcagcttctcctattatagtcatatcaggtgagtgagatccaacatcagctgtatatctaatccactcatctattgatgctgaccttgccctcacagtggtctgattacttccttgcatttaacatttgcattttcaaagactaaagactcaattattgcctttcttgctgatgaatatgatatactccttcccagagctgaagttaacctttataaaaagtcagggaaggtttcttgtggacattgtctgacttgagtaaatggttcaagtcttttccctgattctgctactttgtcccaggcctttaaggctgataatcaacacagtgacagagtttcttcatcatatacagcctgcatctctacctcagcaaagtgaccttcaccaagcatttggtctgtggaaatttctctacccctggctctatttttcctgctgtctccctcactttgtctttccaccattcaaaccattgtaaatttgcagcaggttctagtactgctcttgccatatccttccagtcttgggggattattctctttttaatagcccaagaagtcaggattcattttacaattggcgaatgtatttcaaaattagtgacactttccttaaattttctcagatctaacacatccacaggttgccattcaaattcttgataaccctgtggaggtctttgttgtatattaactgggtagactaaagtttgttttctaataacctttggttggctttctctaattttatcttctgcctttacctgagcattttccttaattgaacatttaaattcctcccttaaggtctgtgtcaaagcttcatatctttccttttgtcactcttcctgttcctgtattctctgttcaagtttcagcctccacattttgatttttttctttatattgcaattctgatagtctgctgcctattttattttgattgattaattttaaaaggtaattctccaagtctgacttccaattctcattatttcctctctgctgctcagtctgatctgtgagctgctgaatcctttattctagtatcttttctagctcctgtctccagccatcattctcctctttctgttgcttatttcgacttatgaaatcctgaacctttagttcattttcatctttttgtctcttattttggtcaataatttcctgtgtcttcaattctagtgtttcctctaagctatgttgccaagtcttaaacttctctttctgttgttcatgctgttctataatttcctgtattttgtgttctaaaccgtgcttccataatcttagcttctctttatgttgtaattctaatattgcagcatctgccttattttgatttgctagctttaataaattatcctctagactatgttgccaagtcttaagcttctctctctgttgctcagactcatctgtgaacttcagaaatttctgttctagcatctcttccagctcctgtctccaaccctcagtctcctctttctgttgcttattttgacctatgaaatcctgaacctttagttctagtgctacttgtaatctcttttctaaggcaaggaattttttatctaggacccggtcttttgagaagacatagtaaatcaagagaataaatattgccatactgataaatgataaggtgtctatttcctttaaatccatccctgtcaaaccattcaaaatatcatcacataaagtcaaaaagatatttattgtgtttcccatctttaagtatcaaaaggttatacgtgtctctttatgtcaataaattacctagtccggagtcctttgtgcctttatctccacagggggctgagtgtagaaagaccctggtggtcctctgggtccctggtttgggttgcagctggcagcgtgtgcttgtgtgctaatttcaggcaatccgcagcataaacaagcagtcaggagacccagacaggctgtcctcacaggcagttgtgttctctacaggtccagggtgaggtgctgcccctggctgctctctgtctgggatttgggggaaggagcctgccattctctataggccactcagactcagtcaatttgaaatccacactgctgcagcctatatcgctgcccaagccctattcagggattggaggacagtgagcttttatttcaggttaattgagttcaaatcaatacgttggcgccattttgttttgataaatctctccaacccaattatgccccggcaatggaaacaacacattaaatatgaatacacgctttgcacctagattgggcagacctaccactacactaccatcttaaccatctaagagaccccttagaacttgtggtttctccaggccttgtgcttctgctctgcttttcttcttcctcctcctcctctgagttccctctcgctcaaacctccttcttttttttttttttttcctttttccagatcacctttccttttatctgcccaatcatcagctctcctttattttacaaattaaggtgggaagcaggtttacaggaaatcacccgagtgctgactcattccatattcacaaccactcacaggagaatggaattaacatcaaatataattagccccagggctatccacaacagtcatggtgtctgttcacagcagtaaagccctaagacagtacccgttcctttttctcctttctttctctttccacacacagtccacatattacacctcagccctatcatatttgactattaccaacatttccctcctttgagtttcagtatcctagcatccctccctctcccctctttctttcaggaaccttctgttcttctcttgtttaccctaagacccttggtttgtggtttttgttgttgtttttgtcgtttgtttatgcctatactcattcttttggccatctcttcccgaaatacagttctggattcaaagtgttaaccattcccaagtatagtttttccacccaggaccttgctcctcagtttcaaatgtcctcttgctatgtccgcaggagtgtctaactcacatgcaacatgtagacttccagtgtgtaaaactctgtttccaaagtaggcttagacttgagtagctttctttacctgccactggttatcccactctggaacagagcagtatttctctcctgtcctctcagaactccttaacaggtagtttctttgctatctctcaggctgttctttgctcttgaaatctcgacagacatgatcaaatcaatgctctcgctctttgctcctcttttgaacccttgagttttccccctctctcttcctcagcttttctcctcagtggttttctcaccttctttgatccctttccagtcctctcagcatgacctgcagacctggcagctggacccctgttcttgggggtggggtgggggagagaagctctccattggtatgccaagcttatgcccagcttctaagaatttaaggctctttcttttattcttctggacaggttaactaggttgtcccattgtgtgcatctctggatgacaaaaactactttccttaagggcaggcttatttggagatatggaacatatttgtagcccttatatgaatcaagacttcccagtttcagtggtactctcctgtaacacacaccactgtataaacagatagccatggccttcatcaattgattacattaggcttttggagtcatagctcagggaactagtgcagtgatgctattttgacaactgccattgctaggtgtagtgaattgtcttttggctttagccaaccaagacattgtgttgtttttatcagcacccacaaagctagacagctaattttcaacttgtaagtacagtaaaatttggcctttcagaatccctgacccccgtcctgagcattttttgttagttccacatccatgtagttctggatgagctgttgtttaaggtaagaactttatttgttcagtttgagtctatgttctctcttctagattgtgtgaatcccatttcctggttaaacagctttgctgtgtggtcaggattacaagtgcttctatacgtagagcctcctggtgaatggcccattcataggtttgagaggaaatgacaaactgactgatatggggtcctagaaggagttgactgaactaatctaggaattagttttcaaagtatgttctcttgaccagtatcttaggcttcaccaagaaacttgttagaaatgcaatcgtgaaggtccttccccaggctaactgaatcagaaactcagggtacaggtcactggtgtttgaatgcatgctctatgcaagttcatccatccagaaccagcccacatgcatatggatagaatgtcagccagtgcaagacagaaccttgctgaatcctagtgtcttttgacttgtgttttatttgcatatatcccaccctgcagagcatagacaaaatatggcttcctctcagccaataaaactaacaggcctgctgagatgtggttcccctgtttatattatatagagtaaggagtccagcttccaagactagaggtcctccttgtgagcagatgagtagctatactgtagaaatttacctgccaaggaacccctgcaggttaacttgtagaaactatggcaatgtttctaggatctaactaagaaattaaaaacctgggcccttcaagtagctttgagaaaatgagtctgctaacagcctatatgacccttgatatagtctctccaagttaagctgctaggtgatcatgcaaaccctggcagctgttacctctagagagactctgaacagagagctctgctaagttgttccccaatttctgacctaaagaaatgaaaaaaaatatatatgttgctgcaagcagaagcagcaaccaggaatgtagtgtaggagtccatgtgggaagagagggcaggctgggaaattcccttgagaaccaggtttgcatcctgtaagcatgattgacagttttgtcctggcatttctaggtcccacacattgtttcctccctacacccaggcacattcaatatatcctaccctgccctttgtagttgccctgcatttaatgtgctctgtttttaatttattttgttcatttttttcttcccatacctcccacaggtaagttctgaaaggccaagataatttgatttggtggctgctgtctagtctctagtttctaaagcacagcttgagcatctcatcggggttcaggcagtatttgtagaacagacgaagccatggttttcatttgaaagttagccagttcctccaagctctgctaaagtcagctggctcttactgctgtctttgcagtatcagcgaattgcatgaatggaaaaataaatgtgaggaaaaaaaaataatttaaacaaaatccttaaggaggggttggggatttagctcagtggtagagcgcttgcctaacaagcgcaaggccctgggttccgtcctcagctctggaaaaaaaaaaatccttaaggaaatggaaaaattggattccattctttgacctctttccattaaaaaaaaaaaaaaattcccagttttgctgttcttgtgagacaagtgttcacctgccagaagtcttattgcatgcaacacttcatttctctgggtcagtctcttgatggtgcgcagtagcctgggtgccctgtgtgtgtatgtgtgagtgtgagaacacacttatagaaggaatccgaaaggaagaaagtgaagtgttcctcagttaatctgtgcccagttttcttttctctctccctttaaagacaagactatgcttagtccttttaaaatggtaggcatcactgccaagagaagagaaggcaaataaactcctggcccttacctggatgtctgttaagcctgacgtgtgtgttctgcttcccacatccttgtgctccttcagcagccttgttttggaatgacagattaggctgtaaggccaacatgtttgcagactatggtaatgtatcccgtatgattagtgagatttcagatggttgcaagtgacaaagggggaaaatgttactaaagaaaaaccctcataccataaaatgccattggaagatcccagaatcaagtcagatgtgagatcatcttccagagcaaaatcatagcccttcataacaaccccctgtctctgtcatctctacatctgtttctgtctgtctctgtctctctatctgtctgcatgtctctctttcctgtcctagcaaaacaaaacaccaaacaaaaattaataagacaaaatatcccaacaacatccaaaaccacatgccaaatcccaagttcctcttgctttgcttgctttagggagcttaaacatcactgatttagtgggtgtcacagctgaaaagtacactattagtttccccttcttttactgaagataacacacctgacacaagggttttggtaactgctgccttgattgttgttgtagatttgaaatttctcctcctattcagccatttcctcagtatgttttaacttaccatgtctcagtttgctcatctacaagagagaacatggcagtgttcctagtgggttctgaggaaggagcacaaggatccaagagaagtgcttgtgatgggctgaacactgtcacagcaatgaaagatgatcttttattaattccccatgcagtgtttattgaacagcttctgtgctggatcctaaagtaggtgtgagatggcattagacagttgtgcgctgccaggtgggtgctgggaattgaactcaggacctttagaagagtagtgagtgttccttacctttgagccatctctccagcgtcccttcctccatttttgttgtacacactatgtattaagctcctgttttaaataatattttttcataagaaaactcccttggatttgcatactctacctaccccaatggtaagggggtagttgaaggaaaaatgaatagattgaaggtagaaatagatacaaatgctaatgaagttcagacatttggcctctatgcaagatttctttttccagaacattaattttacttattaagcccattgaaatttgcttataagatcatttttttaacatggttactactttgggtcttttattttctaagatgctaaagatatagtgttcatcgtttagacattttgtgcgagaatgggcacattggatgttttgatcacattatattgcttatcttacaaaaattgaataatgccggagtggaacagccagagatgctcattgctttccttcacagttcccatttctactctctcctgactcaggttcacccaatcagtgtgctgcctactgagtaaggtgcatgctctggatggtaggacatcaagcatcctggtatctgttgcttagcagcatgctgaggcctctgagtgttctgagaacatctaatgacaaattgggaaggcagctctggctatgtcagatatttcaaatctaattatagtaacacaaaccttttaatatgtatgtttgcacacataggtatatgtgtatgtagtatataatgtatgcacatacattataaagcctttgctctgactttttctttcattagttggtgatattttatattatatacaattatgtgtttgcctttcctcttgtatagaaaataggctcaataagtatagataatttggcagttttcttttattgatatttcctcaatttagctagaacaatgattggctcgtggaatatacttgttaagtgcttctaaaaacaaacaaacaaaaaaggatgaaatgaaaaatgaatgaatgatccttaaaggacagaatcacaaagaatcacagtagctagggacaggataagaatcttccaactcctgaattgtttaaaacattattgtaactttttatacaaagagctcctaaaattaaagataacaaatgttattaatgtgccacaatagtatttagagtcttaagggctgttaaggtggctcagtgggtaaaggctaccaagcctgatcatctggttttgatccatggaaaacaaatggtagaaggaaccaaaactcttaaaagttgtcctctgacgtccacaggcatgtacaacacacacacacacacacacacacacacacacacacacaatctctctctctctaaataaaaacaaataaagaatgaaaaattaaactacagaaaaggaggcatgtacaacacacacatgcatgcacacatatacaaaataaataaattaatggtgtaataacaaaattaaacattctagaaaaggaactttcaggaggtgtctagtggtgcaggctttcagtccagctgcttgtaggcccagggaggagaatgaggcaggaggttttgttatagagtgaattcaaagtcagcttgggcaacttggaaggatgctgtctggaaatcaaaacacaattggcatattagataatttgcctagcatctacatggctctgggttcaatcttcagtacttgacaaagacaagaaaaaagataaaagaaaggaaaaataaaagaaaagttcagtattctactattacatgttcctgatagtgaaatcttgaagacaatataagttgggagttgggatattaggataaaccctatccaagaaacaaaacaaaaaacaaacaaacaaacaaacaaacaaacaaaaaaaccagtgagggtgctatgtaaaagttaagaggtaaatataggaaatggggagagaaaaatctgcaaagatgcctttgtgggagaaaaagaaacagaggaaataggtcaagctacctcaagactgaaaagagaaatttgggcaagagatgatatggtggtctctgggaaactctctgggctgactccaccttcctcttgtgatgttagtaaattctgatgttcacttgagcagttgtgggcttagagtctaagagcacaaaagaaatcactggagcgctgttgtataatttactaataagggtacctctgagacctagggaggtattaatgaacttattgtagctgtactttctagagagcagctataaatattaaccaaaagtatgagaagggcaaggagacagacaggatgtttgacttctgcagtgaggtttacttgtctgggcattgtagaaaaccattcagatcggatcaggaccttcttgcaagtggggtactgaaatcaagaagcaccgacgggcttgagggaagcatgaaaatgttgtagaagcacaccacactctcacttttcatgacacataaggacaagctgccttcttccagagtcgtgagctgaagttattagccacttgtgggcgttgcattttcggggagaatggggtgaagatgagtgagtcctcctctaatagtagcagaggagtgctgagggagtggttgtgggagctagtttaaggtagaaagggaggggacctgtcaactggatgtgagactgtattccaggcattggatacagcttcttcatttaaaaaaaatattttatttattcttatgtgtattggtgtgttagctacatgtatctcagtgtgaggttaccagattctattgaactggagttatagggagttatgagctaccttaaggtaccaggaattgaacttgggtcttctggaagagcagccagtgctcttaaccactgagccatctctccagccctggctatagcttcttacctttggcttttttttttttttttttttttttttttgcctttgcttctggagtagatacaatggcagatacagtaacctcattgaagaatcttagggagttaggtggctaagagcccaagattagctctcagagggtctacaacccttttggctctgtggtcttggacaaaagctatgtattgttatctagaactctatgtaacctccaagactcagctatcttgtaggcaagggtactttccattttacacattcctatagaatgtgagttacatgtgtgagaaacactcacaatttactgtatatgtttatttagcatgtaattacacaagtatttatgtgatagagattaagaagatatgggatgcctgtgtgctctttttatgtagtttatgccaatgacagtgttagaaacttaggacaaacaagcagacaaagtccccttttaaagagaatttccaatacaaatagttcttagaaaataaagccaaaatagaaagggtatttggatagtaatgttttatgagcataaaacttcagtatccagaaaattctaggaaggacagctatgattagggatatacagaaagtgtacttcgatgcctagaaaattccaggccagcacactaggggaaggatatttaaaaagtggaagattctatgatggccagctggggtcagggatatggaagagaaaccttgacaaggtgattccagaggtgggtttgtagtgagaaatggtcgactataaatatttgaaccagatggatgaaatgtgaccagcaaagtaccttaaagagagcagcagtgtggttgcttttcctctgagtcactgaaagaccttcagagaaagactttgaataaaaccaatgaatgatgtttcactgggttgtgtgagattaaaatattttaaaaagtctgtgaggtgactaatatggaacaataaaagagatctcatatcccccacctctcacaaaactcaataactagcaacttggttggctctgaaatgttgattaaatgtaaatgaatgctgatagtgatggagaaggtgtaatataaagccatgtaagcactcatgagtctacaactccaagtactaagttattgttttggtaaagccttagagcaatggagcagttttcaacctgtgggttgcaacccttttgtgggtcacatattagatatcctgcatatcagatatttacatgacagttaataacagttgcacaattatagttatgaagtagcaacaaagtaattttatggttgagggtcaccacaacatgagggactacaaagggtctcagcattatgaaagttgagaaccgctgcattagaaaagtctgtgaggagaaaataggaaacatctatcagtcggtctcactgctggggctggaatctacctagctgttttaaacaggaagtaatctgtaaccaagccatcctgaatggtctcaggatcattgcccaactgaaactgaagatttagattaaacttccatgaccagttctcagtgctagtctacagaattaggaccctctgtggctgctggcatggctgttacaaagctgttaggatcagcaagtcattgtctgcaggatctgcctagttcccaagtggcgacttctgccactggctccagaactgtgctgtgtctccgtgtcagtactagaaactgagagatcacaccttatctttggcatctattgctaaggtcaagacactggaaacccagccacagagcattgatgtcaacttcagtgtgcttggctgtaaaaagagcacacagggctggcgtcaagcaagtcacagagaaggaatcccagctgaaattctgaaggtgctaataggaaagctggttggcaataatgtacctggaacagttagaattttgtttatatgtgacaaccattagtttcactgtagtgctaatatttggtgttttgattttaggagattttaatttacttatagcctagtttgttttctgttgctgtgacaaacaccatgaccaaaagcaacttggggaggaagagctttatttcatcttacagcggatggatttcccttccatcgtgaagggaagtcagggtaggaactcaagtcatgaacttggaggcaaggactgaaacagggaccatggagaaagtcttcttacagacttgctccccatggcttgctcagcctggtttcttcctttttcttttcttttttttaattaacttatttattctcttgtatattatatctcaaccacactttcctcttctttctctccctcaagttcctccctcccaccaatctctcctcttcccacaattcactccttcacttcccttcagaaaagggcaggccttcctgggatcccaaccaaacatggcctataaggttgcaataagagtaggaatctcccctcatattaaggctggaagaggcaacccagtaggaggagaggggttccaaaagcagacaaaagagtttgagatatcccctgctcacactgttaggaatcccagaagaagaccaagctaaacacctgtaacatatatgtaacatatatgtaacatatatgtagagggcctaggtcagacccatgcatcagcctgctttcttaatttttttttccccttgtttttttgagacagggtttctctgtgtagtcctggctggcctggaactcactctgtagtccaggctggccttgaactcagaaattcacttgcctctgcctgccaagtactaggattaaaggcgtacgccaccactgcctgctgctttcttgtataatccaggaccacctgcgcaagggtggcaccacacagtcaatcctcaaccaaggaaacataggaacctgagactaacaaactagaacagtccaagcttaagaagctagaaaagaataaaagaaatggcttggttcataaaagtgtgttttgaggatataagtttgatctccagggcccatgtaaagagaagctgagcttgctgacacacataattccagcactggagagtcagagacagggggatcactggggatagctagccaggcaacgtagcctagttggcaacttccatgaaagccaatgtctcaagaagtaaagtgggggttattgagatacctgccattgacttatgtgaatgcataggtaagtgcaaccctatacacacatgtgtacatgcactcatatacacaaaacaacttgtaaagcgtggctcgggtagggcacagagattgttcagtggtaaagcatttgcttggaaaacataggaatttggagctttagtagccacataaaagccaggcaggaatagtgactctctgaaaccccagcactgtggaggtagagacgggattcctaagctaaggtaagttggttagctagactagtccagttggcaggtcccaggttcagtgaaagactcaacaagagctatatgggaaggagaccacatgttcacatgttaacctctggtctctacaatcacccacacatacacaaacacacacacacatacacacacacacacacacacacacacacacacactatcatgacagggatgttgctcagtgttactgtgattgcataatatgcgaaagctgtggattcagtctcaagcatgtcaaaaaataaacaaatccagacaacagattagagttgacggcagaccttagattgccaacccttgaactagagtaagcatacaagtatataaactaccaaaatgatgaccttaaaccatagcagactaatcagtaactttacttagtatagtctctcttaaagcaccaacaaaagtgtttctgtagttgtattaagtgcgattagactgaggaagacaaattgtgaatgtaaacagagcaactagtagagattgtcctgggggctattgatatgtattgttctagcttcacatctgacattgggataaaatatcatgaggaaaagcaactgaaggcgaaagggttttatttggcttatccttacaggttgcagttcatcattgaggggaagttaaggcaggaaaccaggcattgaatcatgacatctgttggccatggaagagagaatgagtacatatacactcttgcttctgcttctgctcagctagctgtcctaactcttatgcatgccaaggattagtctatggaatcatgccaccaacattcaacattcctgcctcaattaactctgagacatgcccataggccagcctgatgatccagataattcctcactgagattacttcttttcaggtgactctagcttgtgtcaaattggcaataaaaacataccagcacaagagtagtcattatcatcaaaactgagacactgacaccagaacagtctctgaatttgctagaatagaatgtatgtaatagagtgggaggaaattctagctttatcataactggctggaaaaaatcagtttgaagtttggcaaagcagtacatgtctgtaatcccagacctcaggagaaagaaacaggaggtgcaacatgctctagggaactatcccaaaagctaatgactgtctacaggatatgttcttctagttgggctgccttgtctagcttcagtggcagaagacgcagctagccccacaaagacttgatgtgccaggatgggggaatactcagggggctcccatccactcaaatgaaaaagggaggggcgtggagggaggatggggggaacagggagggggcagtgagtgggatgtaaagtgagtaagttaaaaaaataaaataaaagcaaaacgccaagcaaaccaacattctcaagtctgtcaaaggaaaaaaatgttttgaactaaataacaattatgtatattattttaatgactcccctctttgggcaaattgctaacataattcgttgggggccactagagaccatttgtacactctgtccaaatacaggagttgtgtgggtcgtaaactcaaagatgactgatgtttaagtccttaaagtagaaagcctgagtcactctcaggcctcaaaggaaagtgatgtattttatgtttaaccagatgtggagcaaagattttcagaatgtccaggtgggacagtggacttatccactctaccttttatagtatgccaaatttaagaaacatttgtgaatattcacttggaagcaaaatctattataaactgccttggattttagtttttaatctaacattttttccctgctgattgacatcagtgcctttgatctcgtgggcattgtccaaagtgaatccatcacatggtgagtgcagttgagaacctctccctgcttagtatttttccacaagcttcctttcagtggcctatggttatttcctttccactctgaagtccttccaaatctgatactggggcaaggtatttttatttcctcactgtatgaatatttgaagtaaaataagccattaaaaaagttatttactgagcacccttcatagaagaatgtaaagtagaaacagcagcaataacattcaggggcaaaatgcagaacaaagggcacagcaaggtgcaaggaggcaagggattaaccctaaccgcaagcctcccactgttggtccctttctagaaatctctacataattgaagtattatggattagaacaaatagaacagagaaagctctctgctcctaggtcacttgccgtttccatctgtaactgaatgtttaactgtggtgtcacttacagtaccagaatagaaatagcctcccactgtggacggcactctggtcataatttgaactttctgccagctgtgtctttgtgagtggcaggactcaatgtgctttctttggttggttggcttggtgtgtgggactctacaaatataacatattaaacttgttaaagttgaccacccagagtgaagtaaactattcttgctatttctccatttctgtagtgcagttttcagttgatttcctgggttatactgtttgaaaacaatactgaattaaaatggtacatgggagtcacccccagaagttgttagcaggcagcccatgaaaccaacgcggtcagtgtatatcagcatggctgaaagtatcagttgctctggtctagcattttcttgttaaggaatcaatatgaaactatgtatccttgttccctctacctacacactggattcagtgtgtcacatggaatcttgctatgaccttaaattcaaattatgggtttctccctttaagttcttctttgcaggcttcagattttgttggtggtgacttttgcaccattattatttagttcagtcacatatcttgattttcattaatattctgagttgtatttcctactgcatggattgatagaaacaaactcccctttgctacttggatctgttacctgtgtatttatgtgtgcgcacaggtgtgtgtgtacacatgtgcatgtgtgtagaacacctacatgtaaaaatgggtacatataaacaattaaaacacatgtagctataagatataattagtaaaatatatgtaaaagtgtacatctaggcatagatggccttctctgtcttctgagtgcagcatgagtgttggaagaacagaaagtggtgtgcactcgtaatataccaccttctctttgtgcagctgctaggtgattttctggggggaactgagggtctgtggtagaggatttgttccagctctgacagagctttccaggtcttcgcttttctggagaaccctgtcagtgtagtttagaggtggatactttagatatcacaactcaaactcagaattcaaagactcttttaaatattaggggaaagaacaacaaacagctagtaacaaattagaacagtctgagaccatttatggactaggttttataatctattataagattaatagtaagtgtgacatttctttttccattgcaaatttcaacctcatgatcagtttgaaatggcagctgaagttacattcttggcatttcttcagtatgtcagataagaaagtgtgtgtttgggggtgaggggagtctctttaaaactctggaaactgttggcatgttagtgaaaatgtagtcacaactatccagggagctgaggccagagataccctgagacccaacagttctgagcaacataaagagaccctatctcaatcaacaacaacaaaataaacaaatctccatatatgtctgaagcagggcagttgagctgattctaactcctccctaggaagctgttttttactggggtttcataagggcagagcaactggctcaactcaaaagagctctgcaggatttctcaaatcactcctggtcttgaactggtacagaagtctctctgctgtcaccctactccagtgtcctgatggcactgtggcagctaagtaagttgaggtctctctgtttttcacatctctctaacttcaagagcacttgggtcctgcctgttataatgtggactgtgtctctgagacctaaaataatgctgagccaaaagaggtacatcataatatttttatattaaaatcagtgatcttgaacattagctgaccatcagtgtcacccacagagatgaaaacacatgcatctttaagattgaccctcaaaggttccaatttggtaggtcagcaatgatgctcttaaagttggtttcacatggatgagtcattaaagacttttgacgacaaggcaaactaagctttctatagcttccaaagctgaggatattttgaaggttctatgttttatgttttcatctcatattccttgtgactgttgaagagagaagaataaatgaaagatgaaattgcactgaccccagaaatttctagggcagatccaaactttctttcttttctttttttttccccaaaactatccagttattagctggagaattcaaacacagtaactagaaaataaatttggaagttttatatacattttaggtacaaaaagggatcaataaaaattatttttaaattgatttttttattaaactaatgaaatttacttaaaaatatacaactcagtattaacatttttaagtcatcaaaataatttatagtagttaaatgcctcttaaatatacatgatatcttctgaagctaagactaatacacactcaaccagttttaaaaatctatttggaacattaaacatgatagaagtagaaaaaagcggctggaggaacctgtgttgtcgcatcggtgaggatggccctggagacggtaccgaaggacctgcggcatctgcgggcttgtttgctgtgctcgttagtcaagactatagaccagtttgaatatgatgggtgtgacaattgcgatgcatacctacaaatgaagggcaacagagagatggtttatgactgcaccagctcttcatttgatggaatcaatgcgatgatgagtccagaggacagctgggtctccaagtggcagcgagtcagtaactttaagccaggtgtatatgctgtgtccgtcactggtcgcctgccccaaggaatcgtgcgggagctgaaaagtcgaggagtggcctacaaatccagagacacagcaataaagacctagctaggtgcaggccatagcatcttgttcttcacttctgtacttgttttcttgtggaactaaaccggtgggaccccaaagactccccgccctccatctccgaatcagcagactcctcgaaagcagcacatcggccttaagtcatctcactttctctgcccactggtgaagtgggagtgtctgggcggattctcagaggctgtgtcaacagaggaagatgctgatttcccacctgtgttcagggttttgcctttgtctatgggcaggactttggttcaaataccaataaagcgagcctttggaacattaaaaaaaaaaaaaaaaaaaaaaaaagaagtagaaaaaaatctcttatgaagttctgtatgaaagaaaattttgacaagatcctgattagacagaaaccattccatctccaagggaaaatacagtgtaaatgggtaatgttccttgtgtttctatcttgtggaaaagtttgatgagaagtggtattaggtcttctgtgaaggttgtatagaattctccactaaacccatcgggtcctggattttttttttttttttttttttttggttgggagactatgaatgactgcttctatttctttagggactaagggactgtttagatggattatctgatatgttttaaatttggcacctagtgtctgcctagaaaattgtccatttcatccagattttcgaattttattgagtataagcttttgtagtaggatctgatgattttttgaatttcctcagtttctgttgttgtggctcccttttcatttctgattttattaaattggacactgtctctgtgccctctggttagtctggctaagggtttatctatcttgttgattttctcgaagaaccagcttctggtttggttgattctttgtatagttctttttgtttctaattagttgatttcattcctgagtttaattatttcctgctgtctactcctcttggatatatttacttctttttgttctagagctttcaggtgtgctgtcaagctgctagtgtaagctctatccagtttcttttagaaactggcagttagagctatgagttttcctcttagcactgcttttattctgtcccataagttttggtatgatgtgtcttcattttcattaaattctaaaaagtctttaatttctttgtttatttcttccttgaccaagttatcattaagtagagtgttgttcagcttccatgtgtttgagtgctttcttttgtttttgttggtattgaagaccatccttagtccatggtgatctgataggatgcatggaattacttcagggttttgtttttttttttttttttttaatctgttgaggcctgttttgtgactaattatatggtccattttggagaagataacataagatgttgagaagaaggtatattcttttgctttaggatgatatgttctacacatatcttttagatctatttggttcataacttgtgttagtttcactgtgtatctgtttggtttctgtttccatgatctgtccattgctgagagtagggtggtaaagtttcccattattattgtgtgggtatgatgtgagctttgagctttagtaaagtttcttttatgaagaaactttttttaagggtgcccttgcatagatgttcagaattaagagttcatcttagtagatttttcctttgaccagtgtttgtgtgactgtcttcttttggttttgttgaaagattactttcttgctttttctagggctttgttttcctccttgtgttggagttttccatttattattccatttattatcctttctagggctggatttgtagaaaaatattgtgtaaatttggttttgtcatggaatatcttgttttcttcatctatggcaattgagagttttgctgggtataaaagcctgggctgatgtttgtgttctcttagggtctatatgacatctgcccaggctcttctagcttttgtagtctcaggtaagaattctgatgtaattttgagaattctaccattatatgttacttgacccttttccattactgcttttaaaaatcggtctttgttttgtgcatttggtgttttatgtgcatatggtatattatgtgaggggaggagtttcttttctggtccagtctattttgagttctgtatgcttcttgtatgttcatgggtatttcttttttttttttttttttttttttactggtttttttccattttttattaggtatttagctcctttacatttccaatactataccaaaagtcccccatacccacccaaccccactcccctacccacccactccccctttttggccctggcgctcccctgtactggggcatataaagtttgcttgtccaatgggcctctcttttcagtgatggccgactaggccatcttttgatacatatgcagctagagtcaagagctccggggtactggttagttcataatgttgttccacctatagggttgcagatccctttagctccttgggtactttctctagctcctccattgggagccctgtgatccatccattagctgactgtgagcatccacttctgtgtttgctaggccctggcatagtctcacaagagacagctacatttgggtccttttgataaaatcttgctagtatatgcaatggtgtcagcgtttggatgctgattatggggtggatccctggatatggcagtctctacatggtccatcctttcatctcagctccaaactttgtctttgtaactccttccatgggtgttttgttcccaattctaaggaggggcatagtgtccacacttcagtcttcattcttcttgagtttcatgtgtttagcaaattgtatcttatatcttgggtatcctaggtttggggctaatatccacttatcagtgagtacatattgtgtgagtttctttgtgaatgtgttacctcactcaggatgatgccctccaggtccatccatttggctaggaatttcataaattcattctttttaatagctgagtagtactccattgtgtagatgtaccacattttctgtatccattcctctgttgaggggcatctaggttctttccagcttctggctattataaataaggctgctatgaacatagtggagcatgtgtccttcttaccagttggggcatcttctggatatatgcccaggagaggtattgctggatcctccggtagtactatgtccagttttctgaggaaccgccagactgatttccagagtggttgtacaagcctgcactcccaccaacaatggaggagtgttcctctttctccacatccacgccagcatctgctgtcacctgaatttttgatcttagccattctgactggtgtgaggtggaatctcagggttgttttgatttgcatttccctgatgattaaggatgttgaacattttttcaggtgcttctctgccattcggtattcctcaggtgagaattctttgttcagttctgagccccattttttaatggggttatttgattttctgaagtccaccttcttgagttctttatatatattggatattagtcccctatctgatttaggataggtaaagatcctttcccaatctgttggtggtctttttgtctcattgacagtgtcttttgccttgcagaaactttggagtttcattaggtcccatttgtcaattctcgatcttacagcacaagccattgctgttctgttcaggaatttttcccctgtgcccatatcttcaaggcttttccccactttctcctctataagtttcagtgtctctggttttatgtgaagttcccttgatccacttagatttgaccttagtacaaggagataagtatggatcaattcacattcttctacacgataacaaccagttgtgccagcaccaattgttgaaaatgctgtctttcttccactggatggttttagctcccttgtcgaagatcaagtgaccataggtgtgtgggttcatttctgggtcttcaattctattccattggtctacttgtctgtctctataccagtaccatgcagtttttatcacaattgctctgtagtaaagctttaagtctggcatggtgattccaccagaagttcttttatccttgagaaaattttttgctatcctaggttttttgttattccagacaaatttgcaaattgctccttccaattcgttgaagaattgatttggaattttgatggggattgcattgaatctgtagattgcttttggcaagatagccatttttacaatgttgatcctgccaatccatgagcatgggagatctttccatcttctgagatcttctttaatgtctttcttcagagatttgaagtttttatcatacagatctttcacttagttagagtcacgccaagatattttatattatttgtgactattgagaagggtgttgtttccctaatttctttctcagcctgtttatttctttgtatagagaaaggccattgacttggttgagtttattttatatccagctacttcaccgaagctgtttatcaggtttagnnnnnnnnnnnnnnnnnnnnattcttttattggggaattgagtccattgatattaagagatattaaggaaaagtaatttttgcttccttttatttttgttgttagagttggcattctgttcttgtggctgtcttctttttggtttgttgagtgattactttcttggttgttctagggcgtgatttccgtccttgtattgcttcttttctgttattatcctttgaagggctggattcgtggaaagatattgtgtgaatttggttttgtcgtggaatactttggtttctccatctatggtaattgagagtttggccgggtatagtagcctgggctggcatttgtgttctcttagtgtctgtataacatctgtccaggctcttctggctttcatagtctctggtgaaaagtctggtgtaattctgataggccttcctttatatgttacttgacctttctcccttactgcttttaatattctatctttatttagtgcatttgttgttctgattattatgtgtcgggaggaatttcttttctggtccagtctatttggagttctgtaggcttcttgtatgatcatgggcatctctttttttatgtttgggaagttttcttctattattttgttgaagatattagctggccctttaagttgaaaatcttcattctcatcaattcctattatccgtaggtttggtcttctcattgtgtcctggattacctggatgttttgattaggatccttttgcattttgtattttctttgactgttgtgtcgatgttctctatggaatcttctgcacctgagattctctcttccatttcttgtattctgttgctgatgctcgcatctatagttccagatctctttcctagggtttctatctccagcgttgcctcgctttgggttttctttatcgtttctacttccccttttagttctagtatggttttgttcatttccatcacctgtttggatgtgttttcctgtttttctttaaggacttctacctgtttggttgtgttttcctgcttttctttaagggcctgtaactctttggcagtgctctcctgtaattctttaagtgacttatgaaagtccttcttgatgtcctctatcatcatcatgagaaatgtttttaaatctgtgtctagattttcggttgtgttggggtgcccaggactaggtggggtgggagtgctgcgttctgatgatggtgagtggtcttgatttctgttagtaggattcttacgtttgcctttcgccatctggtaatctctgaagctagctgttataattgtcactgttaagagcttgttcttcaggtgactctgttagcctctataagcagacctggagggtagcactctccttagtttcagtgggcagagtattctctgcaggcaagctctcttcttgcagggaaggtacccagatatcttggtgttcgaaccagactcctgacagaagttgtgttccactcactagaggtcttaggatcccctgtggaatcctgtgtgggcccttgcgggtgtcaggcgactccgctggcaaggtagcccggggctcgagtggagcattaggggcttgtgccccagatcaggcccgggtagcctgcttccctatgtacatacagcagtctcaggttccgcgcgattggattggggcaggcgctgtgttccactcaccagaggtcttaggatcccgtggggagtcctgtgtgggcccttgcgggtgttgggcacgactctgctggcaaggtagcccggggctcgagtggagcggaaggggcttgtttttttttttttttttttttttttttgttaaaatttatttatttatcatatgtaagtacactgtagctgtcttcagacaccccaggagagggcatcaggtctcattacggatggttgtgagccaccatgtggttgctgggatttgaactcaggacctttggaagagcagccagtgctcttaaccactgagccatctctctagccctaggtatttctttctttatgttagggaagttttcttctacaattttgttgaagatatttactggccctttaaattgggaatctttgctttctcttataactattatccttaggtttggtgttctcattgtgtcctggagttcctgaatgttttgggtgaggcactttttctttgactgttgtgtcatatttttttttatagtatcttctgcacctgagattctctcttctatctcttgtattttgtttgtggtgcttgcatctatgactcctgatgtctttcctaggttttctacctccagtattgtctctctttgtgatttctttattgcttctatttccatttttagatcctggataattttgttcatttccttcccctgtttggttgtgcttcctgtaattctttaaaggatttttgtgtttcctctttaagggcttctacctgtttacctttgttctcctgtatttctttaagggagttatttatgtcctttatcatcatcatgagaagtgattttagatctggatcttgcttttctggtgtgatggtgtatccaggactcgctatggttggaaaactgagtactgatgatgcaaactaaccttgatttctgttgtttatggtcttaccttgcctcctcccatctggttatccctagtgctacctgccctcactatatctgactggagtctgtccttcttgtgatcctggttgtgtcagaacttttcagagtctagctgtctctttaatcctgtgattttgagattctctggtcctgaactcctgggagtcaagctgcccctgcaaccctgagattctggtgtggccaagctcctgtgatcctgtgatcctgggcatattagagctcctgggagtggagcatcctctggttgttgtgggactggctgtggagtttgtgcccaaggtctactcagggcactggcctggaccagaattatatccaaactttcagttaatgcttcattaatataggggataacttgtgttttatgcaggaaaaacctttgctgactgtctgaacagtgaccacaccaacagacatgctaatggagatgggggagctcagaggacctgtcatttgctgtgataaaacactataaccaaggctatctataaaaaaaaaagcacttaattgggcttatggtttttgagagttagagttcatgatagaacagcaaagaaatagctgagagttcgcaattgatgcacatcctccaggcagagaggcctaactgggaatcacactgggaatcttttagaacctcaaaaccaatccccagtgacacacctcctaatcatttccaaatagatctacctactggggaccaggtattctaatacatgagtctatgggggccattctcattcaaactaccatagggctttacctctagatgcatagctacagacaattaactactgctgcaagggggggggagagagagagagagagagagagagagagagagagagagagagagaatgaatgtcttccctgtgatgagcccactaattagttatccaataccaaatgctcatccctgaaattgtatatacatataagcaacactaaatggattcagccagttgcatatttgtgtgtgtgtgtgtgtgtgtgtgtatacatatcaaagaaaaataggccatgaatttgagatggaatgtgggtggatgtgtaaggaataggaaggaggagaggaaggggtttatgtaattatatttcagtttttaaaaagctgtgaacccccaaaaggtttggcatattccttaccaataaagaaaatgcaaataattattatctggacttatttctccatgtaaaattgataatcatctattgctttcacgtattgtgtgtttgtatgtgtattgtatacatgtatgcatgtatggttcaggaaggttgcttgtgcatgttagtatagatactaaaggtgctagaggacagcatgtgtgtgtgtgtgtgtgtgtgtgtgtgtgtgtgtgtgtagagagagagagagagagagagagagagagagagagagagagagaaagagagatgcctttctctatcatttttgagtcagattctctcactggacttggaactcactactttggctagactgtgaccagcaaacccctgggatctaaaccagtacaaaccctttacccatggagactcttgccatctcaaccatagactaattacttctaggaaatatacagcctaatgaatgaaaattgagttatattttctgttggcttatataaagtacatgatatttcctggaaagtggatggaactgaaaatcatccaactatgcaaatatgcgagattcaggaagatatatttttttaatctttgtacagaatcctcccatgtacagaatccagatttaatacacacatggggtatgaaaatagaaataaaatgggaagctagagggaggaagaggtcttaaggaagtgatggaggaagaacggaagcggatgtgtcacattcttatatgtggaatgtatgttaaaatatttgtttgcatgaaatcaggaagaggactctgtggaagagaaaagggaccaatgtgctgggacaaggcatggtgatgtggatgaattagagcaaagtgcaattgtgtacttataggaaaatgtcaagggattattttgtatgctgactttttaaaagttcctgatacttaacaacttgaaataggtgctcgcttttaccataagatatactttaggatttatttgattctgttaaaatataaaacacatttgccttgaaagagaattccccttttccctgcactttttcattggtatcagactattcttaggttctgcacatctcttgtcaccatggtatcgaagcagacttcgagctatgacatgttgtcaacctgatttgacacctaaggcacagaggtgagagttggtacgaatcactctcagaaccatttagccaatgagtaaccaggtgtagccttctcatcccttccccttagcattacaggtaatgccacatcccaaaatgattagcaagaagaaacaacaccagaaaagaaatacgcctcaaaaatagctgaccaggtctgagctttcatgaacatgcagtctctcactggtggcagaaaaagatgtcctcaatcttttctgtgccacaaggagctatgtttaatttataatgtggaaatgtttcctgaaacagactcataattgttcccactgaaaattttagcccaccttcctcattccttggtgagaaaagagctgggacctttttctttaagtaagccttcttcacagagtccccagctgcagcccttttccatatgaagatcttcctccgtcctatcactttggccttccaggccttttcattatttcctctatgtgcagtccattctcctcctaatagttaataggtataaaccccacatcttttgtgccagccaactcaacatggagcaggactgagttgagttcagaaatccaaaagtataagaaatgtcaccctccttccttacccttctccttttccccctgcagctaatttttattgctgactcattttcccactagaaagaacttcaggaaatctttgcctccaaatcaagagacattcctttcttcttgtctgccacatacaaaagtaaagactcttacaaagtgtagatgcagaacccttaagtgtgagaatgagtaaaagagtcaaattcattttcctctgagaagtagaatataataggtgctaatcactgtataaaatagaatataattcaatatttcttatagttagtccactttctataaacaaggtccccttgtcaatgattggtctcaacaaagtgatctccccataagactgtaaccatttatgtagttgctttctctgacatgtcaatgctaaaaggtcagatacagcagatggcaagaactaaggagagtatgcatgattaagaaaatggtggttacagtcagagggaatgcaaagagcaacaaaccctggagattagccgttgccccttcagttctgagaatttgaataggcatgtgggtgcctactacctgaaatagcagagcttctggtatctccagaggaagaaatccaagacaggaggtacaagatattccacacagcagggtaactggcttcactgatatagtgtacttaggtggcgctggatacttaccagtttcagatcatatgcacggggcaatctacagaacagattagctctgaagcctctgagtgatcccttgactcctggggttaagatcttgggagattaatacaatcaaagctttcatagaaaggaggcttgcatgctgaacttcaagccaagactagcagtacactgggactcaacagtaaactgggactcatccgaggtagggtcaacaatgccgaggcaatggcacaccagctcccactaggctgtcaaaatctaaaaacaaaagggtggaaatgtaggaggaatggcgtctgttgcctctgcataaactccagtgctgtgcagtcacaaaggcatgttgatgcctgcttgaggacctaattgaggactgcttgagagactaaggattgctgacacagacaatgccagccaatcaggtgccaggggccagctttcttgtcagttcctcttgaggcagtggagggggaagaactggagggtaaggctttgtcttatgagatatttagggttgctgtataataataaaaagtttacttatctaagtctaaattactttgctactgtaactgacctgccttctgtgtttctctgaggccagaaactgcagtctctggcagtaagtacctcatcctaaaacagcagtagattaagtaaagaattattttctagagcctattcccttttgtccagatgcctcttgcttgtcaggctagggggaagtttggagcaataaacttcttcttctttttttttttttttcttggtttattcgagacagggtttctctgtatagccctggctgtcctggaactcactctgtagaccaggctggcctcgaactcagaaatccgcctgcctctgcctcccaagtgctgggattaaaggcatgagccaccaccacccagcaatatgtagaatttgttttgttttgttttgttttgttttgttttgttttgttttgttttgttttgttttgttttgtttgaggcagggtttctctgtgtagtcctggctgtcctggaactcattctgtagcccaggctggcctcaaactcagaggtctgcctgcctctgcctcccaagtgctgggattaaaggcatgagccaccaccacccagcaatatgtagaatttgttttgttttgttttgttttgttttgttttgttttgttttgttttgttttgttttgttttgtttgaggcagggtttctctgtgtagtcctggctgtcctggaactcattctgtagcccaggctggcctcaaactcagaggtctgcctgcctctgcctcccaagtgctaggattaaaggcatgcaccaccaccacctggctaggagcaataaacttctattgaaccaggagaatagaaaaatgcttgcagaaggaaaaacttttacataagcaaatatgcatagacacataaattcatataaaaattcacatacatatttatacatttccattcaaaccagttgggtctagattgcatgtattctcttaattacatacttacaaacacacatgcatcatgctcataattacatacttatacacacacatccatacttgcatatgcatagggaggaaaagagcaagcaccagtgcaggaagaactcactcattctggatgaaaaatgagctccaatctttattgcatagagaaagaagaagcttctacccttttaatgctaaatgaattaaacacaagtttgtaagaagaaagctttgttcctttagtaagactcagcctgccttgttattaagaaaagacatgttctgttccatggtaaggagaagcctgactgctccttctgctctctgcagcttcctttttcctctttccctctgtattcttcacattgctttcttagttttctgttacctttggtttcagagttactccactctgcattctccttccaatcttgctctctcctcctgttctgatgtcacagtaatgttcttagtctcaatgtcttttctcccaatgctctgcctttactcctaagttcttcttgagttcagttctgtctaaaacgttctcctcagctcagttccctgactccttgccctccctgtttatacattttcttcaggctacatgatcacgtggtaaaaagttcatcacatgttcacacataaaatttcatgtcaaaaattgaaataaaagtttacaacagagaatgtttatatgcatatccattagaagtaattatcggacatcacctgtcacagctccacaggttctctgacagtgaaaaaccagaattaagttattaatgaagttttgtatagataaacccagtcaatactttatcttctgtcctagcacctatagtaaatcattagttccctttttatgacctttggttaattattttacaacctcttagaatgtgctctaactagtagaaaatctggttactatctagaagcaattaactggtgaaacatggatgactgacagaggtctcattgcagttttgactatcagaaaaggatctaatagcagtcccattataaaagagcttaataatcactgctataattttaggaattcttataggatcaccattaagaattaagaagtcatctattggtttatatagcatcactacaagacaggacatcttcagtgatctgctcaaaagggttggcaaatacctagtgattgttatatatgttaaataataacaggacaaaaagcatattaatagcagggatctttcctaaagtgaatttctcctgggccttgccaatgaagcaaatctgttccagaataaaatccaaggcagaccatctcagaacgatcacttactagttattagcttgtcctatggtggctcctgacaatcaggaactgctttttagaagagatgcttttttgggaccaatagggccctggtggaggatattaaaggagcttgcagcagtgttcagacaagcttgctgctgtgtttctcacctgctccaagagtctgtgtcattgattccactccaaccccaaggacaagtggggtcaggcagtggatggtctagggcacagtgagtacttaactaaagaccatagctgtcaatctcccagaactgattagtagccaatagttcagcagagagggctaagtctctgtgaatccatttctgatcttgacagaatattgataggcttggtcttctgcaggctcacagcaacttctagttggactcctatggcatttcactgagagtaaattaaaatgaagacctctcaacagcgtctgagactgctattcctggctttacctccatcatgtttccagtgaggtccattaccttggatgaggtctcctagtggattcctgcctcactgcccttgctaggtcccagaactcagggaaagaccagtggttgttggcacagttagcagtttctaggctcctcctcttttgatgtgatgcctttgtatgggagtgcatgcacatttgtgtgtgtgtgtgtgtgtgtgtgtgtgtgtgtgtgtctcctctctgtgtgttgtatgttcatagcacccattctgtaaagctctgcattcattcactgtgtcagacttccattgttgagttatgtttgatgtcagggatggattttgcaagagcacttagaccttttcctgcttctatgcattggctgtcgtaaattctgaagaaagtttaagcttctctttttaaaaagtactttttgatcagtcagttattttgcactccaaaattgactacagctgcatttacaacagattcactgatgtgttttccttgaaaaaaaaaccatttgcaatgcagaaagtgttttcagaaaatagacacacacacacatacacacacacacacacacacacacacacacacacaaaatagatgtcatttctcaataactcaacatgccctagctttaaaatgctcctcaatagtcatttacttccagcatgagtgaagactttatgtctgggagcccgatcaggcagcagagtccagtggcagtaggaatgtatgtgcacttagtttctcaagacaatgtcttctcagccaccctataaaatctgagcccaccttaactgaccctttgtgggagaaaatgacatttgattctgatgtcaaacttagaagtctctcttgcttaggcttctaggacacacccatttaggaggaactctgtgtaccttcttcgttttttttttcttttatttgatgagttgaggataaggactatcataaatattcatgatatcagacaataaaatattgtcttttatttttattcagctatacattgactatttaccaaatactttttataaatcttttgagattataatataaattcattatttatctcttctctctcctctctcatccccctcccatttatcccaccttcctatgtatgtgtatatgtacatacacacatattacatgcatattcctaaacacataagtatatccttttcattctttataatgttactggtatgtatatgttttcatggctcaaatactttttcacacctcaggtatactccaactatgagagatgattaaggctatgtgtctattctagcagagactatgagaaattcctgataatacccattaatcatgttttaagtgctgcgaggaataaagggtggggtgtatgggaggaagcagtcagttctgagaaaaagtcggtttggaaactattggattatgctttaaagatgaagtgaagttaaacacaaataaaattgcaggaaagtgtacaagctgctgcaagggaggacaaggtgtcagaaaaatgaagttgtatggctggcagtgggctcctgatggagaatgtttgcaggcacccagtgcagagacactcatggctcagatgctgttgacaagactgcatttcaatttactctcagtgaaatgccataggaggcccagtgggatgctgcagagcatacggttactaggtgagatgggaggactgaggacccaagggtaccagctccacaaaaatctgttcattcttaatacatatttattatagacaatctgaaaaatataagaaaaactcacttagggcttcacctcccaataatatttcctgtgaattttcttcttacaatctttttctatgcagaggaatatacttgatataaatattttaaatacacatggtattttgagttttgtcttctcatttgttgctttcctggattagtatattttatgacacatggatttactgtcctctatctatgtaatctatttgaaggattaacgattccatatttacatccacatctgtgctgttatgagctcacatgttctttgagaccactgaaaagttgaaagaacaagtcactgctggaaatgaatggaaatgatgcctttcaaaggacactgtcaataggacaaaatgacaaccaacaaattgggaaaagatctttaccaaccctacatatgatagagggctaatatccaatgtatacaaagaactcaagacattagactccagagaaccaccaaataagcctattaaaaaatgggatacagagctaaacaaagaattctcaactgaagaatagcaaacggctgagaagcagctaaagaaatgttcaacatccttagttatcagggaaatgcaaatcaaaacacccctgagattccatctcacaccagtcagaatgactaagatcaacaactcaggtgacagcagatgctggcgaggatgtggagaaagaggaacacttcttcactgttggtgggactgcaagtacaaccactccagaaatcaatttgttggttcctcagaaaactagatatagtactcttggaggacccagctatactactcctgggcatatactcagaagatgctccaacatgtaataaggacatatgcgccactatgttcatagcagccttatttataatagccagaagttggaaagacccatatgtccctcaacagaggaatagatacagaacatgttgtgcatttacacaatggaatactactcagctagtaaaaacaatgaattcatgaaagtcttaggcaaatggatagaactagaaaatatcatcctgagtgaggtaaccacaatcacaaaaagaacacacatggtgtacactcactgataagtaggtattagcccagaagcttggaatactgaagatacaattcacacaccaaatgaagctcaagaagaagcaagaacaaagtatggatacttcagtccttcttagaaaggggaacaaaatgcccatgggaggaaatacagagacaaagtgtggagcagaaactgaaggaaagaccatccagagactagggatccatcccatatacagtcatcaaacccagagagtattatggctgccaacaagtgcttgctgacaggagcctgatatagctgtctcctgagtagctctgccagtgcctgcaaatacagaggtggatgctcacagccatccattggactgagcacagggtccccaatggaggagctggagaaaggatcaaaggagctgaaggaacttgcagccctataggaggaacaacaatatgaactaaccagtacccctaagagctcccagggactaaaccaccaaccaaagagtacacatggagggacatggctccagctgcatatgtggcagaggatggccttgttggacatcaatggaaggagaggcccttgatcctgagaaggctcaatgccccagtgtaggtggatgccaggacagggaagggggagttggtgggttggtgaacagggggtaggaggagatgataggttttcaaaggggaaaccaggaaaggggataacatttgaaatgtaaataaagaaaatatctaattaaaaaaaaaaagaaatgatgcctttgctacagtggtatgtgagtacttttctgctaaaagtttggaaagactttctttctatactgtttatgggaccatattaaatgtctcattatttggatacttaaaaaaattcaacagctagaatttaagcacaaccttttatcataattgactgcagcatctcatgtctacctctgaaacggttacctaaaatcttttcttatttattcatttatattaaaactttcatttaaaatatacacaaaaagttaataattgtgtgcctattatagcaagtcataataggcttagggttttcttcttccttccaacatcatcttttgctgttgccaagatttagttatttactgtgcattttttctcactgttgtgccctgagtccataggaaacccagaggagcccaagaattgcaaagtctgctgcaactcgaaaaagagtcttttattgtttcaggtttgaacttggatcacccaccttgcactcaccacgtgaatgctggcaagcgaccctgagtccagaaaacactgggtttatatacagaatagttagaaatcccctgaatgttcacagaaaaggggcatagaagtaatcatttggtggaatggtactgaagtgggaggggggttaatggatgtctgttctgggactaattttatggccagttgtaactgtctgtgacctgacctctgattaccttttctccatgatttaaacacaagcccctagtctcccttgagcttgttatttctctaaagtctctaggacaggcacctggagagttatcaggaggagtgctggtttttggagacacaaaggtggggaggatgtctcttcctgtctcctcagaatgtcctccttaagagggagttttatgggtagggtcattctaaccctaggggagggggagggagccccaggctgctataggagaaggcagcacagaaaccagctgtctctgtatcttggttgccaggctggagggaggatgggagcccctggtgggggtgggggcacgcagaggcaaactgtctgtacacaacactgaagtaatttgggggttacaacactaaccttccttgttttcatacagattagtaattatagagagtcatgtttacacatcaaaggtattttcattcctcccagaaataggtcatatgcaaacaacccagtaactcccccttttgcatccagtatatagttatatatactatatatatacatacatacatacatacatacatacatacataaatatatattgatggtacatatgcattggtggttttcctgtatgtttgtctgtgtgaaggctccagatattctggaactagaattacagatagttgtgagctgctatgtgggtgctgggaattgaactagggtcttctgcaggagcaaccagtgctcttaaccactgagctgttcccccagcccctcaatacattatttccaataactgaaaaaataataaccattgaatggaaggtgcttggtttaattttgtacttctttcacagttacaggcagtactttaatattttatatccatcttcttagatctattccctttttactaacagattcatttttcaaaagcaggaatgttaggtcaaaggctctttaagccctgtcacagtgcagaatcagatgatgcacagagccctctcagtataacctgttgtcctgctttgaacatttaataatggcttagatgtaaattcacatattttttgatgttaacattctagtcagtggattgtcttttgtctcttgtccattgcattctcatatctaagacttgccgtaaacttttctaactcttgcatgttttattcctgcaaaacattgcacagtgtagaaatgtttattctcatgtcctttcacattggtttttctgtgtagcttaaaaggggtgaaaggaattatcacgtggacatgctcagtagcatccatcatcatggagtgctatgctcctttatcctttcccagccatgccgttgcttaagaactagttttagaaagcctggcccatctaagaaggtctcccttactacctatcccttcctcaattagatcatggaagaaacttatattttatcctgccttatgcttacaatggctatcttccatgggcaatggaatgctgttattgttttttcctgaactgagttgaccccacagttaaaaaggtgagagaacattcaagtaatggcctagggtggaatgtagcctgtccatgcataggcttgtctctgctgcgctccctcaggggatgtaggtgattaaaaaaaatacccagagcccatttctgttgactggatatcttggaaaaactcatatcatcaaatttataaatgggaagaccagttctgaagtctacatttggtatacttttctttgtaaaggaagaaattggaaagacaagaagggatttctttttttaagtagaataggtgctagcttttattagtgagtttaaattaaaaaaatatatatattgccctggagacgtttagaatataaataagatatttgcttggggtaaaattacaaggcttgttgaaatcagaggtttatcttctttcaggcttgacttccctttctagctttgatgggaaatgattagctggtagagaggtatgtttgggggcaagtgttttgtgtgtgtgtgtgtgtgtgtgtgtgtgtgtgtgtgtgtgtggtatagacctgtgtgtgactgcgggtgtgttggtgcaggctcaaatgtgtgtgtgtgtgtgtgtgtgtgtgtgtgtgtgtgtgtgtgtgtgtgtgtgcagaggccaaataaggattatgggagtttagctctgtcaccttgagacaaggtctcttgttgaacctagagctaaactggcagccagcagttgtgaatgagattcctggcttcactcccacagtggagagaggtaagaggcacagagacagccaagctcaaactgtcatatggctgctaaagatttgagcttgggctctcaagctcacatagcaagctctcttactacagagccacccctccagccccattagctgatcttgactgtggagggtgggttttgtgaaattcgggtgggatgtagagagaaggcacatgatgtacaggcttctcggggtcatctgttctgcattgcttagtactcattcctgaaatagtttataacctttccccggggcaatatgagggttcattcagaaggaagttcctggagtctatccttcaggagcattaaatagtttttttctacagttgtgtatttacattttagtcatcaacttgtggctgctgtcttcctatgactttatttttgggttgttttggtctgacttgtagtttaatctagtgtgcttctatttttatggatgtcaaagatttctttccagagtagcaaataatacttcaaaaccaaaaaacaatgtctaaaatgacttaatcttgcctttgaaatgtgggagattagagaagcttgggtttttgataaatattttataatacctcctaatgaaaactgattcagtgtgtcttcctggttttgagtgtggttgttggaatactaacatcagcagacaaggtcacgtgacctcacatcaggcataaaagctagagttcaggagcttccactggttgtgtgtcaagtcagtcgcaccaaagtgaaggtcagaggcacttcctggacgaacacccatcacactacctgtaagagactgaaagtcatctgttctgacttttgtttttttcatttttagaaaatttgattcttctatacttgttcccttgacctcattgtaaaactttattttttttttatgtcaacagttttcacagtcaattaaagcttttaaaagaaatggatagattatcattgacataaatgataaataagggttgaaagcttaatacactgtggtcttaagatatacaatgattctaatgcaaatggttccagacaaatactaggatgcatcttgttaggatcttagataatatcttgctgtgcctgtctcctgttactgaatggaattaaaattccaaggttgtcatgtggtgtacagccttgtttagtttaatgttaatattcttacttacctggagctttctcaagggtgagggaggactttggttttatatattataaatgaatatgtagtatacatttatattcatttatatatttatatacatttacatattcatttataatatatattaatattatatattatatagtctctctcttatggagttgtttttgttttattgtttgccttgttttgttgtttatcttttctggtctcccttttctctctctctctctctctctctctctctctctctctctctctctctctcacacacacacacatatgtatgtgtgtgtgtgtgtgtgtgtgtgtgtgtgtgtgtgtatgtaaattgggcatgcttcagagaaagaacactctccccctaaagtttaagaacaaaaattgccatgttgttttttttgcatttgacaggctggggtctctggggtctctcactaacttttctcaaggccagtgcattatcagtagaaagccatgaaatacaatctgatagcactataatagacatctatgtctttataagaaaagaaagggaaacccagggaagagaagaaagctaccatctcctagcattctcagtaaaatggcagaaactattctcatgagagattctagaaggttacagaaaggactggtggaagaggacgttcacctttgtgggtatcttgaaattctacaggcacctattgtctccttgtgacatctaggtatggatcttaggttactgtgtttggagaccttttgccatcagtggatgaagctgctgctgggagctatggtcccctactcttattgtcgttcgaggaaagatcaccatgctaaactaatgtgttgtgatgcttgagcaggaaagcaggtttctgctctttaggtgtttataatctagagaggggtgccagatgtgaaatcaattacacacagcataaggaagaaagtagaaagaaaggctcgagagaggtacaggtgctgggtgataatgatattgctcagaaagctttatttatgaattccctacaaacaattttaggctactacaaccagacatgatctgcttgtagctaactagtttcttagaaaaaaaaaattgtttgaggacctgagcttcaaggtttaatcctgaatgactcctggcaacaacttgaacatataactatcagctgtcacttacagtaagataaccaaacttgaacccttgttttttgacttggcctgtgctatcaggtagcccccactatgaatgggcaggcaagataagctgagtcctcaaaagtggtatagagagccaggtagtggtggttcatgcctttaatcccagaacttgggaggcagaggaaggtggatttctgagttcgaggccagcctggtctacagagtgagttccaggacagtcagggctacacagagaaaccctgtcttgaaaaacaaacaaacaacaacaaaatggtaaagagagagtattcacacgctgcattttagaacaagataagaagaatcacaattcctaaggcaaagtcctcattggtgaagtctgtaccaattttcccaaatagagactccccagagaaactcccaaaaaatctatcctgtaacttcctggttggtctctcaagcagtccgaaaggttgcaaaagtttttgcctccattctgagttagtcaggatacctggatgtcttggttatttctctattgctgtgcagcaacaccataagttgtcttaacttataaaagatggcatttaactgggggcttatgtacagcttcagagagtgagttcatgaccatcatgacgaaatacatggcagtaggtaggtaggcgtgttactggagcagtagcttagagcttacatcttatctacaatttagaggcagagatagagatagaaagacagagacagactaggaatggtgtaggcttttgaaactccaagtccaacctattaatttatctcctccaataaggccacactttctattcttttccaaacagttctactaactatgaacttagcatttaaatatatgagcttatgggggccactggctttctatcttccacactgggatttctctactatgcatgaattagatgtttccagatatactgctgaaatccttaatggtaagatcttccttcacaattcacatgttgaccacagatcaatgactggcaactgcagccccgtctgtctttgaaaattaaaatgcctggaatgttgcttccttggagactgtgggacagggcagtgactgactgcttatctcatgcaaagtcaagggggatggatggactcagggagagtaaagaagagaaatattgtttgttgttcaagagtagtttaggcaaataggccattatattagaaaagatcttaaagtctataaaaatgactaactggcttgtggaaaagccaatttgttgcctgattaactaatttaatttgaggtcatggctagacattggcagtaaagagctaaatacagaaaggagttcacgattatgttgttttttttttttctttcctagattctgtgatgctatgcctctgtttaactcagtgttgctttttctttcttttcttttcttttcttttcttttcttttcttttcttttctttttttcttttttcttttttttttaagtctttgtgactagctcaaatgaaaactgaggtttattttaaggataaaggaaaaaccctcagacccttagaagttagacaaacaggcctcacagcaaggaagggtaagtacatctagtgaaaggagcagcctgtgagcttagttttctctaatgttttgttcaaaggaaagggcacagggcagctctgcaggagatttccaccataggagaattctagcattgtgctggtaccagagtcaaccttgtttacttagcctttccaccttagttcagaactccaagcatggataccacaggctacttaaatgtccatctagttctggaagcaatgaatgaccaggaagggtagtacgcaatgaacaaagagcacccttctcaggatcagatgatgaagcacagtgtgatggatgagggcattgatttgtgaattaattcattgatcctactatgtaatgattttacttagggacaatatgttagtaacctatatccatagtaaaaatttttaaagtaacttgaagtcatggcaagaactccatttttactcttacaacacctgaactttttacaatgattcaaataaacataatatatatttttattttaacaaattggaaccaatgtacttactgattatcatgtgccaggcacagcactggacctttggcaaacctgtaatccctcataagctaccctcatgaataacattattatccttatgttccagatgaaaaggcaggtttcaaacattatggtacaaagttgaaaagtagtttgttttgcagcagtgtgttccccggacatagactctttccagttactctgttgacttgtagtcactcaataaaccattaattaagatgttgtgatgaaatctgcagaactgagtcaattctcattcaggacttattagaggtccacagagatacctaaaaaaaaaaaaaaaaaaaaaaaaaaaaaaaaaaaaaaaaaaaaaaaaaaggccatagcaaacagatgaatatattgttgtgacaaggttgagaaaagtcagttttacattgtgggaccaactgagcaccactgatatggtcagttttcaagcaagatgactaagaatgagaggagaaagttatatggaaagaaagatcaaattatagaacagtgtgctttcattttgcaatacagttgtggatttagatagtttgccctctatgtctgcttgtttcttacagattcaaccatctgtgcggtggtttaaatgagaatatttttcatgggctcctgtatttgaatgcttggtccccatattgttggaactgtttgcgggagggttaggaggtatggctttgctggaggaagaagtcagtagagtctagcgttaaagattctcactattctagtttcctttctctgcctcatacttggggctcaagctgtgagttttcaccttgcactcctcccaccatgcttgctatggcgctgatggattctaatctctctagaaccataaacctaaataagtcctcttatgtcacattgggcatgaagttttatcccagaaaagaagtaaatgataaaaactgtatttaaaatatttttaattgttctgaacatgtaaaaccatcccctttattattatttcctcaatgactcaatgtaaaaacttacattgtgttatattttataggtaatataacacgtacgttgcgttatattttataggttattcagagattgacgtatcagggagaactgcgttggttacatgcaaatactaagtcactggaacatataactccacaaagagtgccccatgattgcatgagtgctgcatgatttgtaagatctaaaatgtcaaagatgttaggtcatctatcactttatacacactaagaaagactagaatgctatcaattaacacactgccattaaaaggcactcggatatctgaatgggaaggaagagtgtgcacactgtacagtatgtggaaaagatatggtgatattattgaagatttctgagaggcaaggctctggtttatttattctggctacttatgtgtgagtggaaattccccatatgaccctgtctctctgcccgactctaaccccagtctcaaaggccagagtgagtgattctcagcttcagaagtaccagttttaagacctcttggcattttctgcatcaggtttcaagccttgaattcaggatgtgaggctaaaggtaaccattgtacctctcctggcatttgaagcctctgccagaactccagggcaatagtaaacacaatacaggagcagattagataagagctatgagcagatgaaagaaaagcagttgagttatggaggtccatgaaaaataacacttcagtctgcgggacaaattaagtaaatgtgcagagcgtagggtactaataaataaacatgttttatatcattaatttccatgcatcactttatattagattctttgtacatttaaatgcaaccataaattctatagtaatgagattagcttgatagtttatccctttgataataaacatattttagttttttttttaccactgttatgaagaaaatataattaagtaataaatattacagtctgaaatctattatttatgacatggtaagttttcttttttttcttttctgagacagggtttctctgtatagccctggctgtcctggaactcactttgtagaccaggctggcctcgaactcagaaatccgtctgcctctgcctcctgagtgctgggattgaaggcgtgtgccaccaccgcctagagtaagttttcatttaagctgttttattgcattccttcttttattaagtcttgggacaattttgtgctttttctgaaagactatacctttcttcccttgctggttatatagttagatatattcacttcactcatatagtacaaggttattttgtatttcaaagaaatctgcaattccctaatttctgctaccagtgtatcactgattcaaaaacagtttatgatcatctcaccatatcatagaatctactgtctgcagagcttcagtcagtggaggccacaaagtcagtaccaaatccacaggggtggttgaaaagatactcagaatatgagagtgccaatagccaatttcctcacggtgttgaaggtgacactttaacctaaatctcatctcttgatttaaaactaccaacagattgatggctcctattccagcagatacatggaagcactggtctcctgaggtggtcgtagtagtaatagtactaattctagtaccataggacttagaagtggtgagggcacaagggctctgtcatcatacactgctattgctgaagaagtttagtacatgtgttactgaattctgctctttcctgccctcactatctcatgggataatgctgccagaaggatgctttccagatgtgagccccattggcttttgatttctcagcctttaggaccataagacataaacctctgtcttcataaattaatttagttacttccctccccacatcccctgctgccccagcaggtaggagagctggagagttggagagctggtcctatccataactagctgtagcactgaggagagcgggccctatggcattggctgagatagccagtcctggagagctcactctggtagtgcaggtgtaggaaagctagtggacttactaacccagctacctcccaggccccagtccagggctttgagttgacccactccaacatctaccacatctatgatctgttggagcacaaacaagtgtaaaatacagacaagtacataggctttgtagctagactaaccttaatttgggccactaacttggcactgtggggccaaaacagtaactcttcagctggatcaggattcatttatatgtgtgacttaaatgtaacatctcaggttagtttttggtatttcaaaagcatacatacagccatttgactgctgctttacagtctatttggattccaaagttctcacatgaccaacagtactctatttattctgactgaggtatccatttcttatattgtgtcttcgctgtccgagattttcttccatctctttttaaaaattaatcactttattaatttacatttcaaatgatatttcccttcctagttaccccttcacaaacacctcattgcatcccctgccctccacttggcttctatgagggtactcttccacccaggcacctactcccgcttcactgctctagcatctcttacactggggcatctatcctccacaggaccaagggcctcccctcccactgatatcagataaggtcattctctgctacatacatatctggagccatggctccattataataaactccagagtatgtaatattatttgtgactattgtgaagggcatagtttgcctaatttctttcttggctggtttatcctttgagtagaggaaggctactaatttgtttgagttaattttgtatccaaccactttgctgaagttgtttatcgggtttaggagttctctggtagaatttttcaggtcacttatgtattctatcatatcatctgcaaatagtgatatcttaacttcctcctttccagtttgtatccctttgacctccttttgtcatttaattgctctggctagaacttcaagaactattgaatagatagggagagagtgggcagccttgtcttgtccctaattttagttggattgcttcaagtttctctccatttgttttgatgttgactattggctaggtgtataatgcttttattatgttgaggtatgggccttgaattcctgatctctctgatacttttaacataaggaagtattgtattttgtcaaaggtttttataccatctaataatttgatcatgtgattttttttctttgagtttgcttatatagtggattatgttgatagatttctgtatattgaatcttccatctcttatattcttttggttagtcttacctgtgagttttttgtttggcttcttcaagtttttatttctaatttttcctcatgtttttgattttgtctttgtgattctattccttcttttgtatcttcatctttctcatcattttattccactggtcatatttttatagacttcattaaatgattattcatttcttctaacatatctttgaacgtatcctttttttttcttcaagagaataagactttattgaaatattaggtttaaaaatttgggggctgggaagatgagatggctcagtggttaagagcactggttgcttttccatagcactttggttcagtagtacccacatggcagctcatgttgtccagttccagggaacctgatgcctcatctggatcccaaaggtactcatacataccacacatacaagaaggaaaaaatgaagtcaactgtgcttgacaaaccagcaatgatgcctggagaccctagataggcatctctgccctgggcactttcttgtatgccagcccaacagggaaactaacctggccatgttggttctactgagataccacaaccaaagaagcccaagagcattgatctaacaattgtttacaatttgaaggctaatccattttacccagagcacacaggcatggtgctagaaatattatttcctcctcaactggggactaagcaaacatgaacctttagcgttaatgcacattactggcagacctgtaatatcagcttctgggcgatgagagatccacatccttggtgtgctaacagccagtttgggttgacagcctgttaaaaccaaaccagcctgcagctggaatttattatcccctcccccaatctaattatatacagtaagtaggcttgggtctattacagtaattgatagggatctggtgagtaattgatagggatctggcaagtgaacatatccttaatagctattttgatgtccttttcttgtgctttagctatactgcatttctcagggcctactgtagtagtgttgctggagacatatgtcatgggtataaatgattatgtttttgtgctggtgtctaggcatctggatttggggtgattgtgattctatgtgttggtttatggtcttgtctatattgaatgggtcttttgctccttgttttttgtttccctttctagatcttagaaacttgtactggctgtggcttgtttggtaagcagtacttctaagaccctgcaggtgtgtctcctggggttcctggaaggaatatatttctatgcatccaacccttacataacagactaggactgggccagaagagcttgtgtgaaatggtccacaggaaggaggaaaactgggtctgccatgaggtctggcagagtccccagagagtgcagtcagacaggagataccggcccctctaaggagtttgcttgagggctggagatgagactggagagttttaaatgtaggacagaaaagacagtgaagactgctgagccccatttttttctaaaataaataaataaataaacaaacaaactgatctacatattctaggacctgatctttcattaatcatttacacagaagatacattctgatgtgtgacttgcctctctgtctctggtagtgtttaggagagacattcttaatcgctcttacatattttgctctgtgtcttgttagagaaatcttgtactttccaaaggttgttatatatgaactggttgtcttctgggattttcagttttgtcctgtgagtcatgtagaatgtgtatattattgtttccacagggataatattattggcaggatggttattacaagactctcctattactgcagatgtataaatggtagctctgccacataccatttcaaaaataagtaaagtttctgaacatatttgtgtgtatgctctgggttctccaggcaccacaggccagtgaaagtgtcagccagatggctcaaggccctcccaggtattaagcatcttaagcatgaaggcctctttatcacatgaaaaagttatagattgagttattgtggggttaatctgtggtacaaggacagcatcaggaccccaaatgcttcccaccttttcttctctggagaaccatgtattcctgtgtttccttgaagcatggctgttctagcctctgcatgttatcagaccaaaaatagaaaatattttctggcctcagggtgtttgtaatcaaagtgcatctaagcagtcaggtcccatgcctcccactaaagattataagttctcagtgaaaggttttgttttaattgtattctttcatccatttttccattcatatttatttatgtagtctgtcattcagctctgagtttgaaaaatagtcaagttgccttgagactgtgctgggaaggaaggcttatctgaagtctcacatcatgtctctctccctgagtgggatacagactctactctctgaatccatgagacagtgaaaggtgaacttatatgacacaggcaaattctatgacagcttactttgttcacatttttaaaatcatgtattttattttcagaattatgtgtataagtatgcattggagaggggtgtgtacatgtgagtgtatgtaccctgggagtccaaaagagggcatgggatgccctcaagctggagtttacagggagctgtgagctatctgactcgaactgaactcaggccctccataagagtggtacatgttactaaccgctgggcagtctctccagccccttgtttacattctggataccccttttaattcacattttttaagaaaattgtttcttttgttttagacttatcaatatttgctttcttggagatcatcacaagtttaggatgagggctttgttcttagttttagtttagttttgttttcttttgtttttggttgttttgggcgggggtcggtgtcagaattttggttggttttcagtgtgagggtaaatcagtatatggagtctttagggttgcagaaatggacaatggctgaatgcataatccttactttatgcgttgtcacttttgtctgaaggcttgttggagacggaaccgctacaaggaagagatggggatgcagtaggcagtgctgacttctctagcatgctctctgaggaggagaaggaagagctaaaggcagagttaattcaggtatgtttagcaatcttctctttctatctttagttcacaacaggacccatattgcaattgtgctatctttcctgtaataaagtataataaatggatacactgcagaatgattcattttcccaaggtgtttttgtaatgctggtcatgtgctaaaagtaaagtgggtggctatactgctttcatattgttatactaacaataacagttagtgttaagtatgtgcttcttgttttccttagtatggagatgttgtgtgaatgttaatcacttatgaaccagatggaatgtattgaaaaccatggcacagatcagttgtgtggttgcacatgcttgctaatcttgctttcaggaatctggggcaagaacatgaagaactggaggtcagcttgggatatgggatgaattctaggctagcttgggctacataatcagaccttgtctcaaaaaacacaaccaaagtaaccataacataggtgtaatctccttaagaggaattcttcaaaatttttattattttaatgaaaattccaatcatgagagcatctagttgggctcttttgcacaagaataaggttctgggagtggggaaataagctacaattaattagggtttaattagaactttagcagctgttgtaggagcccatcctagagaaaatgccaggctcatcctatatacaggtctgtagcgggccttttgtgggtggtctcttctcaaccattgactcactgcgttgggttgggatggtttgtatattcttggaccagggaatggcaccatttggaggtgtggacttgttggaataggtatgacctggttggactaggtgtgtcactgtgggtgtgggcctaagaccctcaccctagttgcctggaagtcagtcttctgctagcagcctttgggtgaagacatagaactctcagctctgcctgtgccatgcctgcctggatgctgccatgctcccaccttgatgataatggactgaacctctgaacctgtaagccagccccaattaaatggtgtttttttataaagacttgccttggtcatggtgtctgttcacagcagtaaaaccctaactaagacagaaattgatacaaggagtggggtattgctgtgatagtcctgaccatgattttatttaaaagaatgtggactttgggactttggatttggaactcagtgggatgctttaaatgggacttaatggatcatcctagtaggaatatagaagactttgttgctgggagtaatttgaactgtgttgacctggcccaagagatttcaaaggagagaaatttcagaacgtggcataaagactgtttttgtggtattttggtgaagaatgtggctactttttgcccttgtctgaaaagtctgtctgagactaaggtgaagagactcagattaattgcattgtcaaaggaagtttcaaaaaaagcccagcagagactttgttctctggttaaattttatgaagagaaggttgaacaagtatatcaagcttagaaaggaaaaatgtaaaatatatgcttcgagtattaaaggggtaccaggaagtgaaatggaccaaaatactgtgttctaggagataacagattaaggaagtgggactttggggtaagatcctatccagctaaatttagatccaggcatggtggtatacacctttaataccaggagataggcatactgatctttgcactcaaggtcaatctacagagcaaaatccaggacagccaagcataggcagtgagggatttggaaaacataaagccagtgataatgtattagtacaagggggtcatgttctagttcctgcaagcagctgaacttggcagattcagccatgtggctctggctctagagttaagaatggaaggaactactgggacaattgatgctggtttgctgcaactaagaaactagcaatgattaagaagagaccagcatcactaaggtgaaatcttctagaagttgttttctgggagcacaatgaagctgtgttccagagatagccaagattgtacctcccactgcagctgtacttggtaatgggaaagagtcactaaggtggtactggtttttaaggcatgaaggtgtcatgaagaacagctgagacttggcactgtgataggtcatggaaggccattggaggtgtagcctcagctgtagttgatggcccaggactgaaggggtcatgcaaaggaggtttgccaccatgaagagagcctattagaagctattggtgaagccaagttggagtgaaaaaccccagtgtattgaagatgtcagtaccatgatcaccaagaacaacagccatagtggagtggatcaacctgagcttagagtgctacagaaggcagagctggagaagtgatgccagcccttacgaggagcagaaaagatcaagtggaatctcagacacttaaacaagctgtaacattgaaattgccttggagacgcaaagatgttaaagatgccagagccatgggatacatgctgaggaaagctgctaacagggagtggaaccagcccaggagaaagaagtctgttgcagtcaacaaagatgaaaaaggagtggagatctgaagaccgctttaacatcagccatggagatgcagagtttggagtttgcccagctggttttctgccttgctttggggatgacagttaagtaagtttctggatggatctcagaagataccttgaactttggacttttatcattgagactgttatagactatgaggactttgaaagttggactaaatgcattttgcattatgctatgtttaagtatggatcccccatagactcatgtgtttgaacaagtccatgggggccagagagtgaaatgtgatggtttgtatattcttgggccagggagtggcaccatttggaggtgtggacttgttggaataagtgtgtcactgtgggtgtaggcttaagaccctcactctagttgcctggaagtcggtcttctgctagcagcctttggatgaagacatagaactctcagctctgcctgtgccatgcctgcctggatgctgccatgctctcaccttgatgataatggactgaacctctgaacctgtaagccagccccaattaaatggtttttttttttttttaataaaacttgccttgattgtggtgtctattcacagcagtaaaaccctaactaagacagaggtgcctcttcttggagagggctacagaagggctcctggagcagagtaaggcaggaggataggagagattcaaccctccatcccttccatatctggttcacagggaaggaagcacattgctttcaattttattatttcattatttacattatattttgttgaggccaagtcttgctgtgtatcccaggctgacctggaattaataatccttctggccagttttctgagttgggtgtatagatgtttaccaatacaccctgctataagtttccattttatgtttatggggtacagcatgatatatggcatccatgtaaatagtgcatggtagtcaagtagggatgtattatatatgtgctacctcacacacctagcttttctttgtggtgagacaatttagtctcttatttcagtattatcgcccagtgggatatcagaacttaactcttacctaaaataatttttaccctttgatcattttgtcttcatttccctcttcagcctccactaaaaacatttttactcttgcctctttgctttttggatcaaatacagatgagatcatgtagtatttgtttctgtgtgcctgccttcaaaataatttcatttcaaaatagaagagcaacttggtcctctaacagaactgccaagtatttcagcaagtatacgctgtgcctcatcaaacagaatattctggctgtctttgctagttctgtatatggccactgagtgatcagacatgtcagagtgcagaacacaggtggccttagtggataacaggctaagtttacacagtttaatgactcaagagtctgtttcacaacctgtgtgtgtcaagtataatatcaaaaatttactttctgtaaactgggataggctaattgatttgaagcttcttatgtgtatacatccttcactacacgagctctcagtatcagttcaagaaggcttctgtaccagagcgaccattgtaaagtgccttggtttgtctgggttctgggattattgggctgtgcattcatatatctatcaaatcactatgttctataaatctgacagtggacattcttattattcttattagcaaggaaaccataagcattgatttttagaaggatgtttcctgaatgcaaactgccagcaacaacattctcagaattccctgtcttcttggtcatagcagtaagcttttagtaagtttcatttccaagactttgggtttcagaatcctgatggtagcatcaaatcttttgtaactgtgctcatgttactgggtctcatggttccatcctttactgtgcactggcctttaatactttctgttttacttctggatgcttcagagataatcgcccagagtgggacatttgggttgtttccctcatggtaataaacagtgctgctttgaacatacagattctcattttcttgggggtatctgtgtagaaatagcactactagaccaaatggcagttcactatttagtttcaagaaaccagacagttttctacagtgctgaaaccatctttttttttctcactttttttcttttttattggatattttctttatttacatttcaaatgttttcctctttccaggtctcccctttggaagtcccctctctcatccccctccctgcctctatgagggtgctccccacccactcacccactcctatcttcccatcgtggcattcccttacattggggcatcgaacaccctcaagtctaagggcctttccttccactaatgtctaacaaggccatcctttgatacatatgtggccagcgccatgggtcctccatgtgttgttggtgatctttggttggttgtccatttcccaggagctttgaggggtgggggtgggggggtctggcctgctgatactgttgctccctccatggggctgtaaaccttgtaagcttcttcagtccctcctccaactcctccgtctgggacccctgagctcagtgcaattgctggctgtgagcatccacctctgtgtttgtcaggctctggcagagcctctaaggagacatatcaggcttccatcagtaagcacttcctggcatccacaatagcttccgcgtttgatggttgtttatgggatgggtccccagattgggcaatctctggatggtctttctttcagactctgctccacattttgtctccatatttcctcctgtgagtaatttgttcacatgtctaagaaacactgaagtatccacattttgctcttccttctccttaggcttcatatggtctgtgaattgaatcttgggtattctgaacttttgggctaatatccacttatcaatgagtacataccatgtgtgttcttttgtgacttagttaccttactcaggatgatattttcaagttccattcatttgcctgcgaatttcacaaagtcattgtttttaatagctgagtagtactccattgtgtaaatgtaccacattttctgtacccattcttctgttgagggacatttgggttctttccagcttctggctgttataaatatggctgctatgaacatagtggagcatgtgtccttattacatgttggagcatcttctgggtatatgcccaggagtggtatagctgggtcctcaggtaatacaatgtccaattttctgaggaaccaccagactgatttccagagggttgtaccagcttctaatcccaccagcaatggagaagtgttcctctttctccacatcctcatcagtatctgctgtcacctacgtttttgatcttggctactctgattagtgtgaggtggaaactaagggttgttttgatttgcatttccctgatgactaaggatgttgaacatttctttaggtgcttctcagttattcgagtttcctcagttgagaattctctgtttagctctgttctccattttttaatagggttatttagttctctggtgtctaatgtcttgagttctttgtatatattggatatttgtcctctagcggatgtcagattggtaaagatcttttcccaatctgttggttgctgttttgtcctaatgacagtgccctttgccttacagaagctttgcaattttatgagtttccatttgtcgaattttttttttttttacttaaagaaggcagagtttatttcagcctacatttccacgtcataattcaacactgagaaaagttggggcaggaacctggaaccagaaactgaaggagaggctatggagggggatccttaatggcttgcccctcatgcttgcttaggtgtctttttcatacaagtcagggccatttgctgaggagtgggtggcatcacggacagtgggctggcccctcccacattaatcattaatcaagaaaaccacctataaaactgactaaaggccaatctatggaggcagttttctcagctgaggtttcctattcccagatgaccctgacttgtatcaaattgacacacaataaaataattaaaaaataataaaaaccaacaaaaatttgtcccagctatgtatacaaaggtgactggataaagaacctgtgatgtacatacaatggcatagtattcatttgtaaaaataaggtgtgcagcagcaaagatgaaattggaagatattgttgtaagtgaaagtatgaacatatagaaggctacaagttatcacttatgtgcagaagtttaaaagttgatcttggaactaggaaagtggctccatgagcagctcctgccgagaccctaaattcagttcccagcactcatggcagacagctcacaactgcctaactcagctcagaaaatctgacatctcctgatctctgtaagtgtatatacacacacacaaacacacacacacacacacacacacacacacacacacacacacacacacacacacacaattgcatacatgcttattcacaaataaaaatttaaaaatgtcaaaaattgaaatcatataaatacatagttgaatagcagttaccagaacctggaaagaaataaagaatagataactctgcaagggttctgatgcttaggaaagactaaaatgactctagaagcccaagagtggcaaacatggctctggcaggccttgcccttctttgccatttcctctgccttgctaaaatatcattagcttacattcctaaagctagtcaccaaagcccatcctttttttgtttgtagaatataattttaatatttcaactgttaatattcaacaaagaataattattttaatgtatttttcatttttatgtctcccttcatttttgattttattaattagaatactgtctctgtgccctctggttagtctggctaagggtttatctatcttgttgattttctcaaagaaccagctcctggttttgttgattctttgtatagttccttttgtttctatttagttaatttcagccctgagtttatttcttgttgtctactcctcttgggtgaaattgcttctttttgtcctagagctttcaggtgttctgtcaagctgctagtgtaaggtctctccagtttctttttggaggcacttagagctatgagtttttctcttagcactgctttcattatgtcccataaattttggtatgatgtgtattgattttcactaaattctaaaaagcatttaatttcttttctttatttcttccttggacaagttatcattgaatagagtgttgttcagcttccatgtgtatgtgtgctttccattgtttttgtcaatatttaagaccagccttagtccatggtgatctgatagggtgcatgggattatttcaatcttcttgtatctgttgaggcctgttttgtgactaattgattatatggttgattttggaaaaagtaccattaggtgctgagaagatatattcctttgttttaggatgaaatgttctgtagctatctgttagatccatttgcttcataacctgtgttgttttcactgtgtctctgtttagtttctgtttccatgatctgtccattgatgagagtggagtggtaaagtagtctcccactattattatgtggggtgtgatgtatgctttgagctttagtaaagtttcttttatgagtatgggtgcccttgcatttggagcatagatgttcagaattgagagttcaccttggtagatttttccttagaacagtatgaagtgtccttccttacctttttttgataacttttggttgaaagtgtattttatttgatattagaatggcttctcaagcttgtttcttgggaccgtttttttttttttgaaaattgttttccaaccttttactctgaggtagtgtctgtccttgtctctgccactgaggtgtgtttcctgaatgcagcaaaatactgggttctatttacgtattcagtttgtaattctatgtatttcattggagaattgagtccataggaaaagtgattgttgcttcctgttatttttgttgttagaggtagaattatgtatgtgtggctatcttcttttgggtttgttgaaagaagattattttcttgctttttctagggtgtagtttccctccctgtgttgaagttttccatctactatcctttgtaggactggatttgtggaaagatgtaaagggctgcaatctacgtgccgccactagatggttctaaacctcattgtgcgcagctgcgagagcacagccagccaaagtcaccagtccatctccagggcttttgcccaacccctgggggctttaacctatccccagggtgcatgaggatcatgggtgttgctaccagtcctagtttagacacgtcaccaaaagtatttaagccacacactttctgagctttctttgtctacctcaatatgatatagaagtaaaagttaaccgtggaagaatctggtgtgtcctgtgtttatttcccgcgggacggggataagctcgggatagaaagatattgtgtaaatttggttttgtcatagaatatcttgttttttccatctatggtaattgagaattttactgggtattgtatcctgggctgacatttgtgttctcttagtgtctgcataacatctgtctaggatattctgattttcatagtctctggtgagaagtctggtgtaattctgattggtctgcctttatatgttacttgacctttctcccttaccgcttttaatactctttttttttttgtttgtttgttttttgttttgtgcatttggtgttttgacaattatatgaaagtttgcggggtcaggggcagtttcttttctggtccagtctatttgtagttctgtgaacttcttgtatgtttatgtgcatctctttctttctttaggttagggaagttttcttcaataattttgttgaagatattgactggcccttcaagttgagaatcttcaatctcttctatacctattatccttagatttggtcttctcattgtgtcctagatttcctggatgttttgcgttaagagctttttgcattttgcattttctttgactgttgtgtcaatgttttccatggtatcttctgaacctgagattctctcttctatttcttgtattctgttggtgatgcttgcatctatgaatcctgatctctttcgtagatttttctatctccagggttatctccttgtgggatttcttcattgtttctattttcatttttagatcttggatggttttgttcaatttcttcccctgtttggttgtgttttcctgtaattctttaagggatttttatgtttcctcttcaatggcttctacctctttacctgtgttctactgtatttctttaagggagttatttatgtccttcttaaagtcttttatcatcatcatgagatgtgattttaaatcagagtcttgcttttgtggtatgttgggaagtcctgggctcactgtggtggtaaaactggcttgtgatggtgacaagtagccttggtttctgttgcttatgttcctgtccttgcctcttgccatctgcttatctctggtgttatgtggtcttgctgtctctgactgtgacttttccctattgcaatcctgtgtgtcagtactcctgggttagctccaggttgtagacagaaaccagaaggatcttgtccccagctgttccttggctcctgtgtcatgatggctctgggaggttccatcttgggccaagattttgaacctatgattacaggtgtgttggcactcctgggagaccagctctctcctgctggtatttgagtaggcagcactgtggtataggatcagctccaggtgcagagggaaacccgaaggctcctgtcccaggctgttcctcttttcctgtgtcctgagagttctgagcaggtccctcagcagaagtggtggtcttacctgcactcacaggtttgtcagcattcctgggaggccagctctctcctggtggtatttgggtatggagtgctgtggcataggatcagctctctgctgaaactctcttagtattttatcagcaacaagtaaagttttcattcattcattcattcattcattcattcactagtgcttatggttttcttgctaaccatatttaatcagttaaaattactcattttagtcgtacatgcttctcacatggagattcatgtgaatatatatacacacacacatatatatgtatatgcatatgaatatgaatatgtatatgtatatatatgtatatgtatatatcaaagaaccctaaatagttagttccaagccagccaatgttatatagtgagaccctgtctcaaataaataaatatttaaatatttaaaaagaaatcaaagaacaaattatccatttctaatgaagaataattttaaactgagggagaaaatattctttttttaaattaaaaaaaagttttattaggtatttccttcatttacatttccagtgatgtcccaaaagtcccccttacccacctactcccacttcttggccctggcgttcccctgtactggggcatataaagtttgcatgtccaatgggcctctctttccagggatggccgattaggtcatcttttgatacatatgcagctagagtcaagagctccggggtactggttagttcataatgttattccacctatagggttacagatccctttagctccttgggtactttctctagctcctccattgagggccctgtgatccatccaatagctgactgtgagcatccacttatgtgtttgctaggccccggcatagtctcacaagagacagctatacctgggtcctttcagcaagctcttgctagtgaatgcaatggtgtcatcatttggaggctgattatgggatggatccctggatatggcagtctcttgatggtccatccttttgtctcagctccaaactttgtctctgtaactccttccatgggtgttttgttcgcaattctaagaaggagcaaagtgtctacactttggtcttcgttcttcttcagtttcatgtgttttgcaaattatatcttatatctcgggtttctgggctaatatccacttatcagtgagtacatatcatttgacttcttttgtgattgtgttacctcactcaggatgatgccctccaggtccaaccatttgcctaggaatttcattaattcattcttttaaatagctgagtagtactccattgtgtaaatgtaccacattttctgtatccattcctctgttgaggggcatctgggttctttccagcttctggttatcataaataaggctgctatgaacatagtggagcatgtgtccttcttaccagttcgaacatattctggatatatgcccaggagagttattgcaggatcctccggtggtagtatgtccaattttctgaggaaccgccagactgatttccagagtggttgtacaagcttgcaattccaccagcaatagaggagtgttcctctttctccacatcctctccagcatctgctatcacctgaatttttaatcttagccattctgactggtgtgaggtggaatctcagggttgttttgatttgcatttccctgatgattaaggatgctgaacattctttcaggtgcttctcagccattcagtattcctcaggtgagaattctttgttcagttctgagccccattttttaatggggttatttgatttttttcgagtctaccttcttgagttctttatatatattggatgttagtcccctatctgatttaggataggtaaagatcctttcccaatctgttggtggcctttttgtcttattgacggtgtcttttgccttacagaaggcttgcaattttgtgaggtcccatttgtcgattcttgatcttacagcacaagccatttctgttctattcaggaatttttcccctgtgcccatagcttcaaggcttttccccactttctcctctataagtttcagtgtctctggttttatgaggagttccttttttttttttttttttttttttagttttgtgactattttattttatttttattaggtatttatttcatttacatttccaatgctatcccaaaagtcccccatctgctcccccacctactcccccacacacccactcccacttcttggccctggcgttcccctgtactgaggcagttatgtggaattccttgatccacttagatttgaccttagtacaaggagataggaatggatcaattcacattcttctacatgttaaccgccagttgtgccaacaccatttgttgaaaatgctgtcttttttccactggatggttttagctcctttgtcaaagatcaagtgaccataggtgtgtgggttcatttctgggtcttcaattctattccattggtctacttgtctgtcgctataccagtaccatgcagtttttatcacagttgctctgtagtaaagctttaggtcaggcatggtgattcccccagaggttcttttatccttgagaagagtttttgctatcctaggttttttgttattccagatgaatttggagattgccctttctaattcgttgaagaattgagttggaattttgatggggattgcattcaatctgtagtttgcttttggcaaggtagccatttttactatattgatcttgccaatccatgagcatgggagatctttccatcttctgagatcttctttaatttctttcttcagagacttgaagtttttatcatacagatctttcacttccttagagtcacgccaaggtattttatattatttgtgactattgagaagggtgttatttccctaatttctttttcagcctgtttatcctttgtgcagagaaaggctattgacttgtttgagttaattttatatccagctactgcactgaagctgtttatcaggtttaggagtttactggtggaatttttatggtcacttatatatactaccatatcatctgcaaaaagtgatattttgacttcttcctttccaatttgtattcccttgatctccttttgttatctaattgctctggctaggactttaagtacaatgttgaaaaggtatcgagaaagtaggcagccttgcctagtccctgattttagtgggattgcttccagcttcttaccatttactttgatgttgactactggcctgctgtagattgcttttatcatgtttaggtatgggccttgaattcctgatctttccaagacttttatcatgaatgggtgttggattttgtcaactgctttctccccatctaatgatcatgtagtttttgtctttgagtttgtttatatagtggattacatcgatggattttcgtatattaaaccatctctgaatccctgggatgaaacctacttggtcaggatggatgattgttttgatgtgttcttggattcagttagcgagaattatattgaggatatttgcatcgatattcataagggaaattggtctgaagttctctatctttgttgggtctttctgtggtttgggtatcaaagtaattgtggcttcatagaatgagttgggtagagtaccttctgtttctattttgtggaatagtttgtgaagaactgggattagatcttctttgaaggtctgatagaactctgcactaaacccatctgttcctgggctttttttggttgggatactattaatgactgcttctatttctttaggggatttggactgtttagatcattaacctgatcctgatttaactttggtacctggtatctgtctagaaatttgtccatttcattcaggttttccagttttgttaagtatggccttttgtagaaggatctgatggtgttttgtatttcttcaggatctgttgttatgtctcccttttcatttctgattgtgttaattagaatgctgtccctgtgccctctagtgagtctggctaagggtttatctatgttttttatttttctcaaagaaccagttcctcgtttggctgattctttgaatagttcttcttgtttccacttggtcgattttgcccctgagtttgattatttcctgctgtctactcctcttgggtgaatttgtttccttttgttctagagcttttaggtgtgttgtcaagctgcttgtgtgtgctctctctagtttctttttggaggcactcagagctatgagttttcctcttagaaatgatttattgtgtcccataagtttgggtatgttgtggcttcgttttcattaaactctaaaaagtctttcatttccttctttcttccttccttgaccaaggtatcattgagaagaaagagtgttgttcagtttccatgtgaatgttggctttctattatttatgttgttattgaacatcagcctcagtccatgttgatctgataggatgcatgggacaatcaatatttttgtatctgttgaggcctgttttgtgaccaatatatggtcaattttggagaaggtaccatgaggtgctgagaagaaggtatatccttttgttttaggataaaatattttgtagatatctgttaaatccatttgtttcataacttctgttagtttcactgtgtccctgtttagtttctgtttccatgatctgtccattgatgaaagtggtgtgttgaagtctcccactattattgtgtgagatacaatgtgttctttgaggtttactaaagtttctttaatgaatatggctgcccttgtatttggagcatagatattcagaattgagagttcctcttggagcattttacctgtgatgagtatgaaatgtctctcctagtcttttttgataactttgggttggaagttgattttatttgatattagaaaggctactccaggggctggtgagatggctcagtgggtaagagcacccgactgctcttccaaaggtctgaagttcaaatcccagcaaccacatggtggctcacaaccatctgtaacaagatctgacgccctcttctggagtgtctgaagacagctacagtgtacttacatatagtaaataaataaatctttaaaaaaaaaaaaaaaaaaaaaaaagaaaggctactccagcttgtttcttcagactatttgcttggaaaattgtttttcagcctttcattctgaggtaatgtctgtctttttccctgagatgggttccctgtaagcagcaaaatgttgtgtcctgtttgtgtagccagtctgttagtctatgtctttttattgaggaattgagtccattgatattaagagatactaaggaaaagtaattgttgcttcccattatttttgttgttagagtcggcattctgttcttatggctgtcttctttttggtttgttgaaggattactttcttgctttttctagggcatggttttcgtccttgtattggtttttttctgttattattctttgaagggctggatttttggaaagataatgtgtgaatttggttttgtcgtgaaattctttggtttctccatctatgataattgaaagtttggttgggtatagtagcctgggctggcatttgtgttctcttagtgtctgtataacatctgtccaggctcttctggctttcatagtctctggtgaaaagtctggtgtaattctgatagtcctgcctttatatgttacttatttccctttaatattctatctttatttagtgcttgtgctgttctgattattatgtgtagggaggaatttcttttctggttcagtctatttggagttttgtaggcttcttgtatgttcatgggcatctctttctttaggtttgggaagttttcttctttaattttgttgaagatatttgctggccctttaagttgaaaagattcattctcatcaactcctattatccataggtttagtcttctcattgtgtcctggatttcctgaatattttgagttaggatctttttgcattttgcataatcttagattgttgtgctgatgttctctatggaatcttttgcacctgagattctgtcttccatctcttgtattctgttgctgatgttcgcatctatggttccagatttctttcctaaggtttctatctccagctttgcctcactttgggttttctttattgtgtccacttccctttttaggtctagtatggttttgttcatttccatcacctgtttggatgtgctttcctctatctttaaggacttgtaactctttagcagtgttctcctgtatttctttaagtgagttattaaagtccttcttgatgtcctctaccatcatcatgagatatgcttttaaatctgagtctagcatttcgggtgtgttggggtgaccaggactgggtgaggtgggagtgctgctgatgttttgatgatggtgagtggtcttggttactgttagtaagattcttacatttgcctttcgccatctggtaatctctggagttagttgttatagttgtctctggttagagattgttcctctcttggttctgttagcctctatcagcagacctgggagactagctctctcctctgtgttttagtggtcagagcattctctacaggcaagctctcctcttacagataaggtacacagatatctggcgttcggacctccctcctggcagaagatgaaggcctgaaacaggacctgtcccataagctgtgttgcttcggcctgtgacagaagctgttagcttctgtagtccacactctcacctgcacagaatagtctcagagggatccgggaactaaggtggttcccccaggtgctctggccaagccctcccgggcagggcagactcctctcctctggcagggaaggtgcctggatgtttgaagctcaaaaaggggtctgtctcagaagctgtcctctagggaccttgggggtgtcagccaaccttgcgcccaaggtgacccagtgctggtgcagacctgaaggaacttgtgaccctagtcagaccgggtttcctgcttccctaatgctgtctcaggtcctgtgcaattggattgcaacagaagttgtagtggtcttaagatctcgtggagagtcctctactggactggtactctactggtgtccgctgactctgtgcccaaggtgacctggtgctggcgctgactggaaggcgagaaaatattctaaatgctttggtcaaagtgatttaccttcacttaatctttattttatgtgacaaacagaaatgtagactgtacatgtcgcctgcagcagactatttgcgggtacttattagatataaaatgtctgaccttgcttgacttacttcaagatatttgagataatgaaagtgggctacatacatgggatcctgtattttacatatgccctcagggtaatttttatgagctgctgttaagtcactgctatcattgaacccccaatcctcagggctatcagggctatgctatttgggtttatagtttcagaaattttaatccatggttgtttgaccatattgctataggcctatggtgatatatatatatatatatatatatatatatatatatatatatatgtgtgtgtgtgtgtgtgtgtgtgtgtgtgtgtgtacacaatcttctcttcctatatatatagtggaagagaagattgctcacatcatggtgggctagaagccactggaagaagccagcattccatcatccttgagggcacatgcagactctccctcccgataggcttacaaattttccatcctctccctggctggaaatcatgatgctgacatatgggcctttgagggcatgctccagatccaaactatagaaactgtgagtgataactagtgagaagggtccaaattttattaagaactccaatgcaaattttcttttacccttttctctcccttaccacacaatagtaattcactgtgcttctgcagctttatgggaggctgaaatagcgagaggttagccctttctccttccctannnnnnnnnnnnnnnnnnnnttagccctttctccttccctacactggtaatttatttctgcaagttcaattgttccccaagatttgttatcacacagtagatactacagaaacatcctacacatcatcccaccccaagaaagaaccagtagtttcagtaactcaaaacaaaaaagagcaggacacctgaagctctcaaagagtcaaggaagacatggcactcaagcattttctctggtaaaagaacagtagtttcttaagcagcagatgacatacaggaaggcactttgacaaagatgaagatgtagaatatatcatgataatcaagaacagagaaatatggttttgaaatagcagcatgttctaagacacagggagaataaagtatatgccccccccgggggggggggtcctgagcatcctccttctgtagctatctgcctaagcatgcatacatacagaagacacaatcatcaagaaaaagacatgctactgattatgaacacatatgaaatgtgtgattcagtctcttttctggaaaggtttctaagaacattcagaaacatttaatgactatgtcaattggataacatgaaatgaacccttcaagaacatttccctgatagtaaaagccccaagctattgctctttcatagtgtgctatttaagatgcttctaatctgtacttgtgcatcttttcctgaagtgattatctgtgtcaggcggcttcctatcaggcagagcaactcagtaggacggtacatgtttatcatgcatgagtctgcaagttcaatcctcaccatggcaaaaacagaagaagaaagtcagaacatgattcccaccgtttagcactgggaaaaagtcttcctgtgccagagaaaagacagctcgttctccaatgatgcaatgaatgtgcttgcagtgtgcctggcagggctagccacaagttgtggtcagaggttcagcaatattttgaatgtaaatgagatgaagctccccattttaaaaattcagaactctaaggatctggcagatctgttacctctgtacacgtggaggactgaggacatcctcaagaagacttgccttgctgaaggaaagcacaaacagttttgtgcaccccagaagcagagccgggagagtaatgcagagccaggagagtaatcactaatatcagagctctccccatagttgtaatacaaagtatagcatgtagttaagtcagactttgggaagcttaaatttatgtgataggatattgtaattccccaaactctgagtattttaagtaattttgttgctagaaaataacttgcaaagacaactttatagtggtctacttgtgcacagctggggggtgtggggggggagaagaaatatgttctccatacaaagctgtatgtaggtagcttttgtagtggttttatttaagcaaaggaaccgtagctaatgcagcaacatgggtcagtagcaaataattgtgctaagtgaaagaagccaaacaaaatgaataagcacagcattataacgtgattttataacattattgaaactgcaaattcaactctagtgaaagaaggaatgttagcagttgcctagtgaggccaagagttagggggactgggaataatggggaaagggaactacaaagaatggctaggaggttttatatatatatatatatttttttttcaggcgccagtagtaggggatgacagcgtcgatacatatatacgtacatacatacaaacatgcaaacatacatatatgcatatgtgtacatacatatgtatatacatatatacatatgtatatatatatatgtaaacatatattacatgtatatatatgcttatacatagacataaattgcgtatttagatacatgcagcttactgtgtgtcagctccatgccaataaatcgttaaagagaacataacctgaatcatgttcttgcatgcattcttatccttcttgttcctccgtttatatggcactggcttggaaaaagcacagtgttggccagatttatttatattaccagtatggtaacatgtctcgcaaaactaagcaaacattagatagtaacacatgaaaagaagttattttgttaaatagtatgagagctacaacaagacatcatagtagggcagtgaggtggctccatcagtaagggcagcacgggcaccagctacaaggtgacaaccagactcagtcccaggacccacatattagaaggagagaaccaacttccatgaataatcctctgacttccacacacgagccttagcatgttaacacccacaggatacagctcagttctccaaatatgcacattagtaaatctaataaaatgccaatttcctagtaggcttcctggtgatttttattttcttgtatatcttggtgcccaatctaaaccattcagaagggacactgagtaccctgggaatgttaaacctaagcattctataaccagtcattctttaaggtcactccgtggtgaggtcactttgaaaagtcaatccgcgaggtcactccatggagttgcttgttgaggtcacttagccgaggcattccaatctgtggaaatgcacttttcaccctctctgatgttttcaccccaccatttttttctctcacctctagctagaagacgaaatcacaacattacgacaagttttgtcagcaaaagaaagacatctggttgagatcaaacagaaactcggcatgaatctgatgaatgagttaaagcagaacttcagcaggagctggcacgacatgcagaccacgactgcgtgagtatcttccagaacttgagttaagttagggagttttcagtcccgccccgattccgcttccgggtttcctctttggcttctcctacaaggttgatttggtgcttgtagcatgaagatgatattttctttaggagcaaggtaaagaagtatgagtgattattaaatatattgcgtgtacagtaaactataaaagaactcccttcaataaaccgttgttgatcaaaactcttaattccaggagctaaggatggatgtagctcagctggtgcttgcctagatacgggaaattctgggctcagtcactaacgctgcatgagggtgtgatgggcgttctttcccttctaacactggagaagtagagataggaggatcggaaattcaagggcatcctcagctacaaccaatttagacaccagcctgagaaacaccagactttgccacaaaaaccaaccaaacaactcaatttagactacttttattgttgtttcatttttagattttattataaaaattttgcaaaagataattatactgaaattaacctgatccaaagtctatatatcacagttaccttctatccaattagaatagtcatttgaaaaagatgctgtgtacactggattttattctttcactatcaaatatatttttatacacatatccaccaccaaaccccaaaatcctgtgacagagttaggactaccaaaacaagtagctttatatcctctttcataattgtgtccattatccaaattcagtccctctgtatcctctaacattcagcctttcttgttcgtctttctacatgttatgcccccccccacatatttatttgtgggtagattttgtataagaggggagtatgaaatatttttatttcagacattgtggaacctcacttaatattacacactctaagtccatctatttttctgaaaattttctgattacattttctttagagttaactagatagtattccattagttcatgggtctgtattagattttcattatccatttatctgttgatgaataattagcttaattccaactcattgctatagtgaataaagcagcaataaacctggggtgcaaatatctctgtggtaggtagtggggttctctggatatgaaatagctgggtcatatgtaggttctatttttttcttcattatttttttaattaggtattttcttcatttacatttccaatgttaccccaaaagtcccccaaaaaccccccccccactcccctaccccccactcccctaccccccccactcctggttctatttttaatatttggaaaatatcaaaacagattttcacaatggcccattaatttgcaccccaccaatagtgaataaatattcttatctttccacatcttttccaacatctgctgtcagatgtgttgatgttagccattctgactggagggaattggtagctcattatcttctgggaatgggcagaagcttcccaagaaatcaggagctgccctttgcacacttgttaccgttctgtctgagcctataaccgtggtgtttgctaattatcatgggctggcaagaccaggtgacttggcattgggatgggacttcttgttatttaaactatttttcttgttaggtgatcttatatgaaaaaggttgttacctaagaggtttttcttcttttctgtgtattgagtattaataaatgataggcaatcagagggacttcctgtccaaaaccttaactttaaccccaagttcagccactgagactctttgtctttgacttatacgtttcttgcctgctccattcagtgaaatataaagatcctgtcttcatctatgtctgatacctgtgggaatcagtcagtaatctgagcttctgatttcaccttttggtgaccagtaccaccgagttgccctgacagtgaatgtctgaacaacttccttctgaggtataggaaggattgtttcatctgacctccataatcatttcaggggttagataaccaaatatggacggagtatttttgtggctgaagatggggaggaagaagaggagggaatagttgtgtacggtgtatccatagagtcaagctgtgatggaggcagcaagagggagaggcatatgtatcttgaatgtggaattacagcagggaggttgtaagagaattgttctagcctagtcatatgggaaagaatgggtagtctctgtttcttgagtttgaagaagaaattggtgtagccaagcagtctacttggtgtataaaatgaatagcacagattcagtgcctggggttaaggagtttacaatacaatcaaagagataagagttttgtttgtttgtttgttttttcatgaataataaatacagagcactgtggggatgtgaattgggataggagttttgcctggcgataatacccctctagggacaaagcagggtttccaaggagtccttaaaggtaatcagtctgagagaggcaggtggtagctcttgagagtgacacacactggttatggttcagaagaactataggttctacccctagggagagcatctagttagtgtgcttgctcagttaatagagttaccttccttctgcagggaatagagatcgtcaaagggtcctatccagtcatttatctaacaagtgctaatgaatgtctactgttaggcatatattacctacgggctaatctagactccaggataataggagtggcatggtgcctacttttaattcagtgttgaaaggggaaaagaaaattgagcaaggaacaagtaatgaaataagcaagcaaggagctgcccgggaggaattgccaggatgcgctatgacaaagccagcatccggtgatttgccagtgagcgacagaggagagggtggaagctgctgggatggagtcccagtcaagaaaatctttcttgagaccctgatttcagctgagacttgaaagactggaaatgcccagtgttaaatgctctagggaagaactttcagggtgagaaaaagttgatacaaagactctgaggcaggaactagcttttcagttttagtgagtcaaaaaaatgtctcttaaaaagtctagacagtatgtctgtagtgtattgagactagagtgagaatttaatgccaagggctttagatgctactggaagatttggaacaggaaatgacctaggttgatgtacatgtatggatcattaacattagattatgtagtagatcatggaggggtaagggtgttaggataaagtgatggaaaagtacctttgtcagtcacaccatgcaacagacctagagcaggaggtttatggggggaaggggagaactaaagggtgccttggagtagctagagggaaagagagagagcaaacatgacaaagaaaagaggagggtgagggagggtgggaacacatgagcaagactgaggtgacccaggccttttatgtgcctcacctggcaatggcagttgatgacacaaactgctgctgctgagtcactgacgggcaggttggcagagtgcataatttacaacagtgggtgggagttgggaaatcatttctgagactgttgtaagagggaggcatggagcaggggaaggatctggaggtgagtctgacaagaagtcccaatggtttggaggtaaatgcggagggaagcagtggtcaaatgagaccctcttgtattcttggattacacagtacccattccacttgcctcagtgtcaggagagcattgctctcatgggctgcagatatgtcagcttggattctgtgtacacagggaaagagaccctgtcagtaccagggtgatatggagtgaggatttaatgaagttaaatattgtaggaagatgatgtccaatgctttgtaggcctgtggtaactctatgctatcattaggaaaactgagacacagaggtagatctgacactcaatgattgtatcaaacattttggtaatgtttgaactaccccataagcaaatttcagacagagaggataacttgaccaaagttaaagccagagatgtgtgtgtgcatacatgagtgtgtgtgtgtgtgtgtgtgtgtgtgtgtgtctgtgtctgtgtgtgtgtgtgtgtgtgtgtgtgtgtctgtgtgtgtgtgtgtgtgtctgtgtgtgtgtgtgtgtgtgtgtgtctgtgtgtgtgtgtatttagttatttgctcatgggtatcattgttagactggccttggagattatataataagtccaatgtctgtggtttcactaacctttaagaatgaagatgaactcctcttagtagagaagagccaaccttatcagagcctcttcttaccagtgaagagcaaaaagtttatcaactgtataattttaggagaaagtcttcgactaaccctatttccttggctgctgagggatagttgaggagggagcttataatatgttgggaagagaaataacaaaaatattttttaccctgaattaattaaataccactctttagtattcatgactcccatcctagcacacattctgttggacacaaatgttgagatgagagaatgatgagctgtggtgagttagctgcggaaaaattagacttcaaagcactgcaaagggtttcagctctcagagaacaagtgtgatgcccagaggtgatactttgcataatgattaggcaatcacagtctatttaatttgattaataatgaaaagaaaaatccttgtatgctaatgaaagatcttggcatgttttcctcagcaataggattcaaattgccataggtcccaagtgagtaagaataattacataatggactcagatcatctcctttatagaaatagttcaggaatacagaagcaggacaaggggttatctgtgtatatgtgtgagggagggggcaatggcaggggtagttgttctcattcttgcccattttgttcatatctagacttcttttattgtcttttagggtcaaggaggcagggtacatgtaggtggcttagagccagtaaacctgtttatttattcaatgttctgctttgtgaacccatgaaattcttccaccaatcaacctctgtgcattgtaccaaaggcctaatggtaggtccatagaaggtaggaggttttcaaaaggaattttaactcctccatgtttttttgttttgttttgttttgtttttttttgttttttgttttttgaaaagcacaggaactaagctacccagaaagaattcagcctaacctgcagcctttcagagactcacagtgcctgaaaagtgaggttcagtttaggacttagttactctttgctgctgggcttgatttttttgggtcaccatggtctgaatgacaattatctctttgtgaggagcactttgtagctctgctgcattcagatgtatcaatgaagattaaaaaccttattttaaaagttgtgcatgccgaatctcccttggctttagttctctttatcttcagggtgctatttattacacaaacctggaagtagattcttttcttccagacagaagtgttaaattaatattttaataacatacttaggatgccttgaaagaaaattatcctaaataattttgtaagtccttggtgagatgttaaaaagacagtcattaagggaatgaagtgttttaaatctcttcttaggagacatatgttcatgctgtaaaataccttgtaagaaaacagttgatgttgtagtcctttcttctagttatatgtagaaaatgcttaagtccaaatcacatactgttttgtccttttgattattagcactgccttttaaaatcataaatcatgtgatctatgtgaactaccaagggaatctatgtaaaaagccaataaaattctttgtatttgtcttggagaaggtcttcaaaaagttctacagaggatgccctgtgtaccggcaaaccagctcacctggctgttaagtgcttaacatttcagcagagctcactcagtttgagatcaagttcaaccaggactccacataaaattacagggggtgaacaatgtacaacctgaggtacccttcatgtagactatgctgtaagtggtgctccttagagcttctaagtactgggagttcaatgacctatttctcataggcccttggttgctatggtgttggtaatcacttcccacatataacttcttctcactgcctacacctggagatcttttttggttattgactctaggcaccatgtaaatgactactaactattcttaagaaacagtttgcctaatgaagagatagaaaacaaaacacacacacatacatatacacacatcttagaattgtgtgtgtgtgcacgcacatacacacatgtgtgtgtgcacgcacatacacacatgtgtgcatttgtgtgcataattgcttgtgtgcatgtttacacttgtatgtggaggccagaagacctcaggtggtgttcctcaggccctgttcacctttattttgagacagaatttcctgcacatcataaaattcttaaaacatggtcttattttctctacatgaaactgttgctataaaaagctggcccaactcatctccgtgtcatctccaaggtgaaaggacattatgggggaagggagtcaccaactctgtcatcatggagctaccacactcttccatcctaccattcatcatgtgtaatctgaaggactcggttctaatggccttcagaattaacattaagggctcaaggcccaaaattcaattctcagtactacacatgagcacaaggaaagaaaaacaaataataaaaagaacaaaatggagttaccagttattcctcagaaataatgagtcctggaatctttaatactgcattgagacaagcataggctgcactgtgactttgaaattaaaagtggaaataaatgatatgcatatttcattgttgatacataagtgtgactaacacagaagtccacagatcttcatgtgcacctaactctcattattggaaatgactttaaagcaatgtaatacttactgtttacaatatgactgcactggctagttttatgtcaacttgacacaggctggagttatcacagagaaaggagcttcagttggggagatgcctccacgagatccagctgtaaggcattttctcaattagtgatcaagggggaaaggccccttgtgggtggggccatctctgggctggtagtcttgggttctataagagagcaggctgagcaagccagtaaagaacatccctccatggcctctgcatcagctcctgcttcctgacctgcttgagttccagtcctaacttccttggtgatgaacagcagtatggaagtgtaagccgaataaaccctttcctccccaacttgcttcttgttcgtgatgttttgtccaggaatagaaaccctgactaagacaatgaccttatttctagccagtttcaaattaagccatcaaattcagtgtcatacatatatgcaaaaaagtctatatcacaattcaaagccctctcaaacacacagggctaaactacatagaccagcccatagaagtagtaaaaatgcaggataattgcaagaagctgttaaagcatgcaaaactgacacatcagaaggaatcatctaggctaactcagctccttgtgatgatcacccttgtcaccgttttcttctgtgtcctttgaagtatctttcgggccactcaagtcggggctgagaggcttcccaaagacatttttctcagccttccaggactgccttttctttcctattccagccttcctgactagggcttaatctgtttatactgcctttcacatggtcaaggctccaacaagctatggccctattgaatagagaaaggtgggttctagtcttccttggagtacaggctttttattccttccaaatagaacattgccactaacctgacctcttccttgccaaatttacagatatcacaaagtggaaaaagtagagcagagtaccccgggtttgacagagcctggaatccttgggagcagtggggcagctagggcagctgaagctgggcaagtaggaaagaggccgagtgagtgggttaggctgaaagaccagaggggctgggagtatgggctttggacttctctatacatgaaatgaaaagctagtgaacggtgtcaagaaaattgagacttggcttgatgttttaatggctctttctggctggtgtgtggaagagactctgtagggagagaaaggtagaaatgggaagacaagttaggacattgttgctacaagagcccaggtatgtgctggtgcccggtagagagtggaggtggtgagagaattggcaggttctagttctgctgtgaaaattgaaataagacacaagggttccttgctggattggaggcagaggaacaaaggtcaaaagtgatgctggcctatcctctaatggattgtttcatttccccaccactgtgcatgagagattttgcacagaaaaaaattgcttctcgatttttttcccagaattgtgttatcagtattagtacagagttctccaataaagctaactctaaatcctagtctctagtgcatggatatgtctcatatacatattgtgcttttctttcctccacggtgcccccattctgtcttttaatctactttttgtagatatggtttcatgacccaattactacattatgaaaagtctatcagcatcctagaaatctaatggggtaggaatttcagattttttgatttgttggtacatagaatgtctttattttcataattttctttttaaagtattttcaagtgtgtgtgtgcatagaactggagaacttctaggcggtggtgagcagcctgatgtgggtgctacctgacgtggtcctccacaagagcagtgcatgcttttacccactgagctatctacagccccagactctttatttttaaggccaacggtgttacatttcaacactgctgagtccagtccattagtgttcagtatactacttctggatccttttgagtggttagtttgttctaaagaatttcagctcatgccatttggtgattggagagctctaaaatcatgtgacaatgcttaacattcttattactaatcttttatagtcaatactatgctaactgccttattagcagcaacttgtattttaatattttatctcaagtataaactgccaggtttatgtttggtttcaattggtcatagctttactacaatttttaaaaagttatatgtgtaaaatgtagaaagtaaaattagactttgaatatgctatcttcagaccttttcagaaattaaataaataaagttagatttttctggacgtccctttcttccatcttctgactactccttagctgtgtgacctgttaccagccagggctcaccatacacacaatctgttcttcagagacataaactccaagtcaatgacttactcgtgaaatacttttgaaatttacaggttcacagccaggaaagaagtaaggttaaactccaaggtcttaagtgtggcttgttgctattttaatgtttttccttgaaatataagtatctaaaaggagtgttgtctccacatagcaaccttcacagtgaattttgttaattgtgaaagaacttttggctccaagctggcaagagacttcagccgaactctaggatgaagtaggggtctcctttcacttcccacatccccataattcgtcttgtcctttttttccttaagatttatttattttatgtatgcgactacactgttactgccttcagatacactggaagagggcattagaccccattacagatggctataagccaccatgtagttgctgggaattgaactcaggacccctggaagagcagtcagtgttcttaacaatctgagccatctctccaacccctttttcaatttcaaccttgcctttcaattctgtttcattgcttatcatttacagctctagttggtggcttgcacctgggaaagtggagaagctaaaagtgaggtagactaaagtctcatgcaatcagagcatgagacagctttactcagcatcagataacttatactctgagggttaagtagagtaagttgagtaaagtgtactagtcacaaggacaagctgtacatggcaaaaacatgtttttccacagagaaacattaataacaacagctggagtaaactcactccaatccactacacctgggaggagtatgaaagtacattcgaagaacaattctgtgttttgaagaaattgaggttataacactgacttggggttttattgctaggaagagacaccatgcccatggcaactcttataaaggaaaatatagagctggggcttgcattagtctatcatccaggtgggaagcatggtggcatgtagatagacttggtgctggagaggtagctgagagttccacatccggttccacaggcagcaggcaaagaatgagatgcagttgtcctaacttgagcttcttggacttcaaagctcatccccaggtactcatttcctccaacaaggccacacctcctggtagtaaaactctaattacagttgaagtccaccatcatgggttgattgcctcccttccttagcatggcttctccttctctgaccttgcctggggaattctaaacccacacttatgcctctacctgaggaatgtcacatagcctcaattagatcaatttcctttcttctgacaaaacctgttcatctggcacctaagattcctgaagtgcttccccatgccaataaggcatctcaggtaccctaagcccccaaccaatgacctttgcccatcctcaatgttcctaccgtcagtccctcaaaactttaaaaagctttgagtcactcaaagtaaagttgatttgcctcctgatagctggtcaaggtgtggtttatttaccttaagtactcataggacttctgaacacccttcatcccatctctgcctgcctctgccccccacatagtgacacatccttataggcccctggggccattttctttcaaaccaccacacgaatctcttgtcatcttggagttttttcacaggaactcagaattctcacatgactccactcttggactgtgttctgactcttaccatgattctcttttcattctaggtacaagaaaacgcacgaaaccctgagccacgcagggcagaaggcaacagcagctttcaataacgtgggaactgccatcagcaagaagtttggagatatgaggtaattcggcagaaaaacacgggaacgctgccaaaaagcactgtgtgtagggagggtattttttctataatggttaaatgacattgatgacagaaatacattttcgtgttgggatattttctgtctaaaggttgatttagaagcctggctccaaccatactctttctaccaataaaagcaaaaggcagagggaatgaggagggatttcaaaacaacccagtgcacagagaacctgactgattttattaacctttccctttactgtgaacagaaaagataaagccaggaagaattcattttgtttcatagtttgaaggtgtagtctatccccatcaggaagtcatggcggcagcggtacgggtttgaggcagctggtctcaaggcaactgtagtcagggagcggagagctgtgaatgccaaagctctccttttagtcctggagcccatgggctagtgaatagaaacagccttctagatgcaaccagagacacagtaatccagacacattccatagtaattctaaatctaatcaaattgacaatacatattaagcatcatatctcttaatttaaatgatacaggaaaatattccgtgggatatgttctggtaaattattataggttacattttttattcaaccatctggcttatttcatattataaaatggtattatttgtcttatacttctggtagttttctttctttcctttaccagaataccaagatatattaatcatttttacaccttcatgcttaataactgaatcatcatatatgtcataacagcagtaaaaactttaagtaactaccctccatgggacatttgccagtttacagagcagtaaggaggactacaccgaacatccttactgtagaacaagggaagcctgttgtataggatatttttacttttttatattatatgtatgggaaaggtttcacaatattattactgttctatttgtattgtttaaatgcctgttgacttgtttggaatttgactgatgtggcttaggtgatccttctttagaaatcaattttatttttctcttagaccaattttttttttcccagagaaaaggttgctctgtatatccctgcatgttctggaactcattctgtagaccagactggcctcagactcagagatccacctgtctctgcctcctaagtgctgggattaaagtcatgtaccaccagtgcccaggccaaattattttttttaagttggaaagttttacgtttctcctcttaaaagtttatgtcataaatttcttaaactattatttctttgaagctttgatacctagaaacaaatattcatgtctttgtatttagtgttttacatcaaaggtggttgggttatgcatcatagtcaggaaccattttagtgaagtattcatgcggatagttaattacaggtatggatgtggacactctccagtgttttgtcttcatttttatgaataccacattatcaaaagacattgacatcttcagaggcagcatgtgatttttgtattcttagttatttctaattttattaagtttgaagttgtatcagtggattcaaactatttacttgaacaagtatctcttatacaagaaagatccttctgcccattgtatatgagaaaatatatttggctatgtttatgaaatttggtctttacatgtgcacttgaaatctttctcttgaacactagagcattactgccaagtagtgtccctccatctccatgagtccatataaacatctctcaagcgttttaaaaatatgtttttccaaattgcacttcttcaagattgggctcagaggggcttgggtggaggttaggaatctgcctctgtatcaggcacgtggggaagtgactgcttcagatgtaattgatccatcttctacctggatgtgttccctcatgaactgaggaggagaggagggtgggctaaggctgtaattcagtagtggacagtttactttacatacatgagggagctcttgggtttcatccaataaaatcaaagtgagggaaacccaagtagcagcatcattagggtattatagagcatggcatgtactgtgcatttaaatgttagtttattatatgaccatctcaaggtggtccttaacatgaaggaaatcagtattcatctatcatcatctttctctaaatagtgagaaacaaaggctgttgcgagagtatgttggtatactctggttcatattgtaacaggatatgataaccagttgtcaactgccttttctcctgttttaaggtgttttgttttagcacagtgcctaactcttgacccaggacttccacgctagtcattaattacaacttcacataaagacacacagttttcattgtgaagtggctgttcatgtgctagagttatgtcagtagtaaagcaattgcattggtgagccctgggactctagcctcattgctttcaaacgaatagtgactaaaaatcctgggacacgtagtatatgtttctagagattcaaatataattctgaaaatttttataaagttagaaaaagtcagagatatatttctagttttatcaagttttagaaagactttttagttttaagttttactaaacaagtaatgtgtagatgccatttaaaagtttcttcaggttaataccctcaaatgagaaaaaaaatgtctttatgttttgttcaaactaatgtgtcaatttataaaacaatccaaggaaatgttaaaatgtactttcctttaaactttctgttgctttaaagtatgctgttaccctatatttgtatccattatactataaaattcctttgtgtgttctaggaccaaattcatgaccatggtcagtctttttctccaactgtgaacagcattagtagtgcttggcccacgtgtatgttaaagtcatgtgatatccatgaggtgaagtctgaggaagtgtcacccgttcggatagttcttataacattggaatcctctcagaagttctcagtgaatctgtccaaaccatgatccagtgggggccaaacgttaagaggaagcatatgatggaggcttgccatcaatatattgttgtggcaaaatgcaacttgaagaaaattttaacagtgttaaagaaaaatctttaagacaagttaaaaagtcagcactattagctgttgtttctacattggtgggttccaccaaccacaggttgaaaaggttttaattcatctttattgaacatgtgcaaagttttgtactaacattctttaagtaacaaggcatggcaaatgctatatgatttttaccctgtgttaggtatcacatgtaatgcaagtaataagtatagacgctgtgtgcaaatactgaaggactctattcaaggacttaaacatcctgtgatttccatatctactcagtcctgggacccttcccctcagaaggcaaactgcgtactcaaaagaacagcaaaaggagttgcttaaacctctctttttggcctcttacaaaggagtgaaagccacagggggggcatttcttcacagtctgctaactctgcccctttcttttctcccatgctgcctggctgcaggtctcactcttttgggtaagcacactatgttgagtctgtgaggctgtgtgactcctcctcccctgcctatccgttctactcatggccctcagctcccttcactctgtgccacaaccagaaaaacaagaccattttctctagcatgcgtgttaacaaggaagaggccagttatgcagcactacgtccactagtgttcattcaaccacacattcatctcacttgtgaatttccctatcagtttcattttctggacagtctcttagcttgagatctcttctgtaagcaccatttcttctgacattgacttggtccttagaatacaaagacgtgaagaaattgaggttctttgttttgttttgaataaaacttgcagaacacagagttgagaaacagagaaccattttccacctatatttccggagaacagtggttcttcgagtattttttttaatttgacacactgatgtctgaacttccattcccatatttttactggacaatacttatgttaataagttagtggctttcagcctgagtgacaggctgccccccaaaaacctgcttttatatacttttaaattcagcttgaattggctgatttcatcagtgaagaaaacctatcactgaggacttcaacataagctccccctttttttctggaatcacagtatgaatttaatgcacccccaatccaccgcagccctcaccctagattgtatttaatgagatgagcagatcagtaatacttgatttcctgaagcagtgtgttttaaatgcaatttctatatatggtctttggaagactacaaatctgcctgaatgacttttgacatttcagtagaaggttgcccatcccaatgaccttaggtgatagtttctgggatacgtgatctaaaacctgttagcttctagggcagtggttttcaaccttcctcatgttgtggtgaccctaaaccaaaaattatttttgttgctacttcataactgtaattttgctgttgttttgtatcataatataaatgtctgtttctggatgttcataggcaacccagagaaagggttgttcgaccctagcaaggggttgaaccccacaagttgagtaccactgttctagggagaagagaaagcaggatccgtttaaaatgtggctggagaacaatccctagcccaggacaacggaatccagtttgcttcctcccactgccttcaccccagttttggagaaaactcagtagataataccacacaatgagagggtagatgacaagtcagctactctaaggttaagatcctgaaactcccaggtgtggttatatttataccagttgttcctgacagttagtttagaatggatgtagaagtcctctccttccagcagaggtgtgtgtgtgtgtgtgtgtgtgttttcgttgtgggggcgaactgtattagcctagcatgtgcttcctaggatgccttttcttagccatctgcatccctctggacagtttctgtacaatggatcattagcatctacccacctggctgtccttcctggctgctgctcttcactcttccccagtgtgagaaggaagtggagaccagggtcaggctgagggattccaaccctttcagatttcctgcagggcccctaggaaagaggggaggctttggccattgctcgcctatttttccttataccctcagaagctgactgtggctacttatgccaagggaaaacaaataccatcttggttgggtgggcaaggaatactgtggatatttaaaattgctgctttagaactgttaaaccaggacttttccacaaacctaaattatgctatcttcttaatgtgctttgtcctgaaggtactccatccgccattccataagtatgcctgccatgaggtaatgtgcacaaaatattgacatcactttaatgcagaatgtattgaagcacttatttttacttgtaggttccttccccatattgctttatgtgaaaggagttagctgaagtaacctattatgtctcatgtttctttccgactatcttgctctggacttgggtttctgacacactcggccttaaattcaattcttcttgagaccagagacaagggcttcatctatatcaactgccatttccttaccacatgctataaagtattaagagctgctctgcatgaatttatgaggccaaaacataattacctatataagcactaacaagaggcctggaacattctaaacacatttgcataattaaatgcaaacacaggagaaaaaggagagagagaaagagaatgggagactcatagggtggcattcctgttaaagatgtcattaaaatttgagatcagttgtctgtcaagagtttaacaatgacagacgactacaatcctggatagattactgatgagaaacatggcttatgattaaaacaaaattcctcgtggtaatagtctggagacatgggaatgaagaaaggcaggctgtagcacagttctgacaacaatcaatgttacagacctgctaaaaccatttcactgatcaattgtactgtatagaaaaaaaggaagcaggaaccagatttgctgctcttcccatgttgcccctgagggatgctccagcagcctgggctcctgtcattgtggcataaaggagcacatcaagcctctaggaccttcccacacttcagtcggaatctggacaccctttgcttcatagtgtacattatgatttagagtcatcgcggagggaattcagtttcagagaccctgggaaccaaattctcctagggtcatttgtagtaccaagagtttatagttgtacatgggtaattaaatttgcttaaccagctctccctgtcctttagcatgcattctggtataatttaattagagaaatgtttattctttaatgtctgatgaagtctcttctatgctggggatatttttcaattagttggttgggaaatttaaccactgtgtttggttttccatatttggtagaaataagattgcttaattcatcttcaaccaaattgttagcagctcccataaggtacccaggctgattagtccaacacaaggcatgtagctcttggaaaggctaagtttacatctgggtgtccgaaggaggattggagaaaacaaaagtcccactctgtgaatcaaatcagaaatccatcttgtggcctaaagggcaaacgcaatctcatgaatttcctgaagttaggtttgagaggaaattaagtttactaatctaacttagatccacaaaacatccatcttacctgcctacccactgtaggaccacataactgatggatatcatgtaggcaggctcagccaaataaaacccaaagagaaaatgaagtgccacactatataattttgagccatacaaatataatttcaccatgaaacagggttattatgaagaattatttataggaacttgactaatatttgagtcatgagcaaggtacaaagctatgccctgcagctggaatgggggtacatttcttgccatggggactgacaaagttgcagaaacaatcctcaacaaagccaaagacccagagaatatattttgtacgatgactgcctcttgaccatcttagagccatggctcatcccacaccttaaagcaaaacccaaatgtcctagccacactcccttatcaagattctctaagtcattcctcttactttattatcctctgtactcaagaacaagcagcttatcaaatataataaagtctaattgaaatatttgacttgactataatgacaattgttactgaaatgtgatatgcaacatttaagatatatcttttagtttatcttctatttctttaattaggtttagtagtatcagtgtaatcagtgtggtgtagagatacttttgtgggcaaatgcaacaaagaaagcaccaaatgactgaaacccagaagatggaagacaggtgatacaatatttgagtcataaataaaatgcctatcaggtaggaaggctctatctcctaagaggatgggaaaataatatatgaagctaacaaagaaatgatttagaggtggtggagatggggcatccaccatataacaagaagaatatcaacttttagaaatgctatttcctacaattagtcaacatcattattttttaaggcacagaaagagaaaagccaggaacatttttttttctccttgagctattttttgtccttcttgtctcctatttactagaagcaaacaaacaaacaaacaaacaacactttaacattccaagttggaaatcttatgcatgacatgtaaacagctcttccactgaccattaaaacaaacaaagagaagagttaggaaaaggactgttgtggcagaaaacaatacattaacaaatataaaattagctatcagcccattgactccatgaaaataacttaaggaggactatggagttctcatgaaagagaattgggttttcattcaccacttaatttcctaacactactcccctcccccaatatatgaacttattacagttggatcattgccatgtgctatgttatttattgcacaggccggtatctgaccattttactttgaaatatgctatgctgtttctggaccttcatgagcaggaataaacactttaagacacagttggtccaggtcacaagccgagagccagctctggtgcagaagtgctatttatttacaaataagagctgaaaaccaaacaacatggtagctaaggcactgagccttaagagctgacctctgttttcttattttaggaattcttctactttcaaatcatttgaggagagggttgagacaactgttgcaagcctcaaggtacagatgcagtgacttatgtatgattgggtccatttcatcaggacagcctagtcttagcaccattattgctacaggcaaggtagggccatcacccttctgtgtggctagggtggtagatgtgcttaaagacaggccatttcctcccatagagatctattgataaagtcagcagccacgagtcttcctgcatccttagagttgattataagccactcagggatagagtgctcatgaaagtgaattgggttttcagtcaccacttaatttcatatcacttaatgaagtttctataataactcacagatcttctgatttggacataagtcaaacagtttgccatgtgtcataatgccaccgtataccatcaacctcccagactatttactaagcttacatactgaccacagcacagtatggtgattacagtgggaaaattaagcaaatgcattgttttcccataatgtatttgctctctgggtagtaactgaaattatgcccatttcatgctgggtgataaactttcataaattgtccaagcacatgtgctaatctacagaacgagggtggggcggcaaaagaaaaactagtcttgactttaaacgcataaatgtaaaacaggaaaatcagttattacaagaatcttttggaagtgccacctaaataaatatgtaataacatcttatataattactatcttgtaggcactccgttcatatattttactattactgggatctatagatccaaatggtaatgatttagctgcctccagaccctcaccacatcaatctcacatttgctacatggctgacaggatgtccattattcctaaccacaggccccgggtattttcaatgatttagatctgaaggctctttctaaaaccagggtcttatacaaggtctactttcctaggtcgttgaccagcttttgaagaataaactctcatcattcagtgatggttatgcctccattggcttcttcacatgtcagcattgtttagaacttgccaactttttctctttgttaaggattagaaggagccattacggtgtcccataaagtagggcctttaaaaagaaaagtacagtgtgttgtgtacgtatcttacgtatcttgtatcaaaataaaaggcccccaaatcccaagtcactttctcgacacttgcatttaagcttcacatcagctcataagtacagattctctttcttgttagaggaattctgatataggaggagttctagttttcaatctcctctagcagaaggggatataaagaagccaaggaagaaatcaagaacaacctgctttcttttgcttttaggaaatgggtaaggtcacggttcccatgcagtgaaagggtccgagttcacaatctcagcctcttactgtttcctcctcatggagccagaaggcatactgctccactcctccttcagacaggcacataacctattaaggctgtactatgctgagacctcctgaaagcagagtctgtgcctgtgcaactgctcatggctttactaatactcacacccacatatctgcgctctcacagccaaagatgaatcagctctttctgcccagccaggcagaggaggagagtgcatcaccaggtgttgcatgaagcctcccacttcatcaacagaaacttctcattcacttcccgctactcataccaaataatagatatcgtaaagtctcctttcctatagcctacttcctgtctatagcttcttttcgttctaaatcttttaagcttccatatcagtctctacttatgagccttgaggctgttttctctggagggactgagtagtttaataaggaagaatggatgtctctgttgcatttccaggtacaaactccactttatgtttggattttaaactcctgacagagaattaaggtcatgcttatggtctaggaagaataaaatgtcctactgtgaaggatacaagcaacctgcacactccacagggcattattccaagccagtttttctcctctctccagttcaatgaacactttgatattccatggggaactttccagttcattataatcataaagaatttagtgctgccaacatactggcaatgtatattactcgaggacaccttgtctggtgtcacctgtatgtccagccagcattcttgctattccaccctaagtagacagatgcagagccagtgtctgcgaaagcatattttgtgtatccaaccatgttctgtctcatcacaaaccccaacacccagcccacccttcctctctgtggcgcagaccatggctttagtgtgcttactcttaatgaatacatcccatggactgagtcagaccctcaaaaactgaagacagactcagtacatgacgcttgttgatgccttgtgttctcctagacagttatgtggacagagtagtagcccaaccctacagttcaaatgaaattggctgcaaagagcaattataattcaggggacaaagtgatgaatccttagatgtaaaaaataccatagaggggtacaaaagaggtttactgtttgagtctttgttcaaactaagaattagtctgccacccagagcatggtagtgtgcaggcattaaaaacacctggttaggaaacctgcagcccactcgtttgccagagtgagtttttaaaaagcacctttttaatcttactatgttgatttgagaaagaaaaaaaaactagatatcaagaaaagtctaaaggggaaacatcaaaattcatctgacataatactatgtgatttctattattaaacagaagctagaagaaaatttaaattgggggtgggaggttaagacagcatctatttatgcagccctgactgtccgagaattcactatatgaaccatcctggtctcaaattcacagagatttacctgcctctgcctcctgagtgttgggactaaaggcatgtgcttcaaggtctggtgagaattcaaaattttaaaaccccaaagcaactagtactttaacacagtaggttatattaaattaatcctacttattcctcttaggaaagaaaccgtactaccagctcaggcaggaggaagtaagagtttgaggtcagcttggcttgtgtagagtgataggccagtctggggtacatagtctggggaaaataaatatataaataaaaagtatgatctaagcaatgtagaaaagtcaattcaatttaataaccgaatttaaaaggcaaaatgatttttatgctgagttaagaggtgtttttaatgagtgaactgcttttaagccctggttaagtttttataaatgtccttttaattttactttcttctatatgtgtgaatgttttgcctgtatatatgtcaaacaagtatgcctggtgcccttgttggtcagaagagtgcttcagattctttgaaactgaagttagtgatggttataggctgccatgtgggtgatgggatccaaacctgggtcctttgcaagagtaatgtgctcctaaccactgagcaatctctctgcaagggcagggcagacagcatggagcccttcccatgctgtgcacatgtctgtattactttggcatagacaatgagtcagcaatagcagagttatctattctctactttccttttccttgatgtttttatacattgtggatgcataaggaaaggccagtgtgagtactgagacttgcattacatattttagaatataaaacattgatctgaagagctttttaatgaattcagaatacttaagcacaaatttaaaatgtaaattgacttctgtttctacttggtcattaaaaaaggacaaaaaagaggcccaccacatagtgtctgagttaggattgctattaagagacaccatggcaactcttataaaggatcttataagccacataattggtggtaaatggaaactcttataaaggaaaacatttaattggaggtagcttacagtttcagaggtttagtcataggttaccatcatggcgagaagcatggcagcaggcaggcatggtgctagagaaggagctgagagttctacatcttgatccacaggcagcaggagactgcgtcacactgagtatagagtataagagccctctatctactctactctagagtgtaagagtataaactgcccccccccccccgtgacatacttcctccacacctactgcaacaaggccacatctcctaatagtgccactccctatggctctattggagccattttctttcaaaccaccgcatatagtattctcaaggattttgatgaaattcgtattgcttaggacaaaacaaagcaacaacaaaaacccagaccctcaaaaaaaaaaaaaaaaaaaaaaaaaaaagtagggtcagaggtaggctggagagagaagtcagtagataaagtacttcttgactttgcaggtaccatgaccagatttcagtttcaagaactcctgttaataattcagggcatagtgatgtacaattataattcttactcagggaaggtggtgacgaatacatccctgagggtttcttgacagccaggcttgcctctggagaattccaggccaaagaaagactgtcagaaagaaaagggatggggttagggggtaggggcatggtacctgaggcaaaatacctgaggttatcctgtagcctccacatgcatacacacaatatgtacatgcacacctgcacacaacttgtattcacgaccacatgaagatgcatacacacatacaaacaaaggaaagacagtttcagaaattaggattggcttctagttatgtcttaaatagaaacctaagtagaagtcacatagggatgtttatacatttgtaaaagaattaatctaagatccaatttcaatttgattgaatgaatttctctagataaatagggacagatgttgcacatctgcagatctgattatattcatacagggattggaattttacaagtagaagggataaagagaagaatgccaaacttgtgtgaaattaaagttcgaaatcttatcccagaaccgagattaatactattctgacaaataaaggaaactaacatcggctaacttcatgtgcctctgaagaaaattggttatgtctaaactcaaaggaaattaaacttttggcacttttatttttaaaaagtattacaaaaattataatgaaaaaaactaactggattttcatctacctgttcatttcagacgaaagtaggtgggacaaaccacggtggtggcagttttgaggaggtcctgaactccacagcacacgccagctcacagaatgcttcagcaggctcccggcagaccaaggacgaggagctgcagtgctaggtcccgcctgggctgctgctggtcaatctgcctgctcatcctctgatatgaagaccaaaatcccactgggaaccccaagttttgacattgatatttaaatggggtctccaaaaagcttaataaaatgatttctttttgcatttgtgttgatgaccactactctggagtatttacaaatgtcatctttaaaaatagacaacctggagcagggtcataattgttctgaattcttgtctgcggaactcaatgtatttcccaatcatgcagatactgattattagctttggttttgacttggtctccaaaccaatatgcatgtctcagagtgcacctgccagtctgtagatcgacaggtgacactatttatgacggtctccagcagggcgcaaatcctacaaacttcaccaaattgcttgtgatttttatgtgcatttatttaagtcattaaaataattcattttaacgatggctggatcttttatttctttgttggaagcaataattctatagagatacttttaaatcaatttttaacccaatgaccaggaagttctaagcccaattatcatctaaggatactgaaacagcctctgactctaaaattccctccgaactgcctagtccagtaaatactcaggtagagtgtctgagaagagagccacaggcgaagctgggttataacaaatcctcaatttatatgttgttcacacatataaagctatcctgagcttccagcagcgacttttatcctttatattatattatatacttctctttacaatggtaacctggttgttgtttgatatcagggattaaaacctatgacatatttttaaaatataccaatagacctattaattaaaacaattcacaataataataataataataataataataataataataaaaacatacaatggactggagatgtaactccaggagttggtagagtgcttatctactatgcacaaagtgctggctttcacctcccaacgctgaataaactagggattgtggttcacacctgcaaccccagtccccaggaaatgaagacaggaaaaccaaaaagttccaggcaaaattcagctacacagtaagttcaaagctaacctgaaagtcttctcttccagttgacatagcacggcaatctatccagaccatagatacaagtgaaaatgtagctggttcaaggtcacatgacctgctgaggcacattagcatagggaactggtctgtatacttgatccacagtgggcaggttagacacccagcacttctggcagtggtgcccacagtctctggcaggaagccaactgtctagctggtattaaggcaggcagctctccagccacaaaatgatggacacagtcctccccacccaatttctggctgccagtcagttccaagtgttcagcttctgtgactctccctttctttttaaaactacagttggcacactgaacggtgacagacatagcattctcataccataagcgttctcatacccttacaattcgaaaacatggaatttaaaactgcatagaaaagtgttaaaaaaacttaatatattaatatctcaaattttctaatacaacaaccacagcacttaatgtattcatcaaaattctaagtttaccaattttgttaataaaccataatcattccagaactcaggaagtggaggtgggaggagggggagttcaagggcatccttgccctaattgtgagtttgaagctagccagggatacctgagacccactctcacaatgaaacgaaacacactcctctatgctcatatctgcacaactctattaagctaaagctgcttattccttctgacctgggagtgacattttccaatggactgtgtgagcatccttgcacactgtcatgcccatgagcaacttacagcacttggatcagaataccatacctgacatatgtaggtgggctatcttaataaaatgagatgggtaatccagcctccagatctccgtccttccccatgagcatcttaagtaggactggcctgtttctatctggctttgcatgtacaagctcatcctgatctggaagtctgctgagtttgtcagtaatgcccagctgggctcactcacatgcattaaaatcttttgacaagtctaaagaagaatgtgtacgcaatgacagaaccttttactaacaagtcaaaatgattccatgaaaccttacacacaaggaagaatacctaaaccaataatgtatttcggttgccacaaattatttgcaaagggcttgggggaggtgagatggcacacatgctacagtgtggtcagaggcacttaatcagagttggttatctccttccaccatgtagggccatagggattgaactcctgttatcaggcttggcagcaggctcctttacccactgagctatcctgctgcccttcattcatacttttgtttcatatggtagagggtttagctcatatcatggcaaaccaaaactaaccataaatgtcttagcctgtcctctgttgctgatgaaacaaatatctgaggctgaattctttataaggaaaaaataggtgtattttatctcctaattttggaaattcaggaatatctctttagttctggagatggccttgtggctgataagagaagctgtcacaaagtgatcacacagtgatcaaaatgagagggccaggctctttcataacttcttgaaaaacaactcattccactaagagtagcattaatactactagagagaaacgctctcatgacatacatatcttatgttaaattcagaatctaaaggtttcacattgagaaccaagctcccagcattgaaacctggacacacacctggacacactacttattgaacccagctttctagatcctgagcctagatacatacattgtatcaagcccaggctcctagcacataaacctggacacttacactgtatttaacctgggctcccagcattttagcccaggcacatgtataccctgcagcagcagccagtcccccataaagatcgttgctctccattttcaaactgtaaaattatatacataaaaaaacagagtccaaaggactgcctcctcacaatgaacacctttcagcagtcactggcctcagaacacatatcacccacaagtctttgagacaaactgacattttccaagcacaaggccacagagaattgtcacagctggagaaatgccaagccacagggcaaacactgatgaaaatattttttgttaaattcaacccaaggatatttactgtacatcataattacaggacttattcagaagaccaatctggccaagctgcaagaacccccaaggaaaaaagtattttaagcaacaatgttccaatatttgtagacattactggtggattctacagttatcttttcttatttacggtgtgttttttattctgctttttactagcagtactatcacatttatttcttgctcagaaataaagtttagttaaagtctccttgtgaactgctactgggaggaaagtgaaaacctgcgagaacaatgaagcccagagtgcagggtctaagtcagcagaggcttgaaacacctcgagatggtcctaactggtcatgaaggaaacaaagcccagggccatggagaagtttctggttacaaacacttgaactgaatctgagagtactttgtgtcaaattcaaaccaaatgaaaaggctccataatactaacaggcagaactgtttctctactaatcaaaccttcaaaaacagtgttttcacattccttacctttccactcagtaaatacacatacgcatgagttacttttgaagagatagtgcaccttgcttcttgcacctgggtatccatggatactgcaaagtttctggagaagcgctgcttagaatgttccatatcagtcttaaagggacagggctcatcactccacaatgaattacctcccaggaagacttgcatggatggtcatcccttccacactcttcaatggagtacacaagcaaaggcatgtggaatgaattcccaccaaagagaaataagagggagactgaagttggtagatatctacttttggtgcaaatactctagtaacactctttatcaccactcatgattgtttttataatcaagccatgaaatcagagaaaaaaaaagctaaaggggaagacacatggtgttggaaatattatgccccaatttaaatccgcacatgatgaagcactgggaaacagtgcaagcctgttaacaggcttagaaatctatagtcaggggcctaaagcagcacacaattaaattcaaaatctggctctagctgggcgtggtgagaagaggatctagggtggcctgtaccagccagagtgaaacattttcttaaacagcatcaaaagttagcttagagacggtgtggtatgagcctctcacctgggggacacaacacaggattaacgtgcacagtggtagcttcctgccacatctgaagaagaatcaggtcttacaagtaattatacctaaaaagcctaaattacaatgaatctgaccttcaaggatatagcctagtagtaagcctgagtaaaggaattcaagaaatgcaaaacagaagacagagtctggagtgtttaacagctttttttttttttaattcacacagaaaagcattctcttctccagtcttcatccacggcatcttcctgtgcatttccagttcagtggcttcttttagggtctggattatctcacctttcttgttcaagaccagatcacagaaaacagactctcatcttggggaaaaccccaggaaacagagaaagcagcactgtggagcagcaaggcgatctcaggagcccggctccgctgaggctgtggccatgctggcatttctttctgtttccagctcagaaacaagctggactatctcagggtgactgaattttcctgaggaggaaaaagacatttccatattgatgagagaagacacccacttcttcagcttgaccccatggctctcaggggccctgttctctgagctggaccatatccccaagcaggagattctacatcaaggaaaggtaaaggagaacagttatgatggggcaaagatgagaatcaaagagtcatgagttaggaagaactggaggaacactacacagcagcccttgagcgcctttatcaggaacggtaggggaagcttgggtgagagttgagggggttgttgatagcctggggctaattatatttgatgttaattccattctcctgtgaggggctgcgaacaaggaatgagtcagcactcaggtgatttcctgtaatcttgcttcccaccttagtttgtaaaataaaggggagctgatgattgggcagataaaagggaaggtggagaggaaggtgggagagagaagaagaaaatggaagagggagaggacacagaggaggaggaggaggaggaggaggaggaggaggaggaggaagaaaagctgaagggaagtcacagcaatagctcagtataaaataatgacagccctgtctagaggaaacagagctggaaaaagaaaactgaaccggtttcattttcaagcaaataataatttggagattagtctgtgagccaggattttgttttgctaaggccacacaaggatcatggcagaccagagaaaggcctgtccttacaaccctctcagaagaaatagacacagagctgactgtaaagggctcccaggaaacgaacaaggagtcatatttgaagctataggaatgaccatctgtaacacggtaggtgtaacttcttgttttgtaaactatcaaaatgaagacagctaacagtgccagctgctgctctgagcggatcacaagaattatccgccaacatctagacacaatattataacgtaagtccttctagtgttcccaggttatattggatggttgaatctggggccttgcacatggcatgcaagtgctctgctacggaactatatccctagctcttccttttaaagatagtcttactatttaactgagccgtcctcaaactcaacccttctggattgactttctgagtgtgagcatgtaccgcaccagacttagctatccccactgcaaggaaaaggaaacaaaggctccaagagcctaagtgtttatggagatttacagatatacatggcataaggaagattcaaacccacactttcggaggccagggctgtgctatgaggtactataatgcccacctggagcaaggaggtggaagacctgatttaaatcacttactccaaccttacaggtctaaagcactaacagacaagagccctttcacattcattatctccccctgaaaaccaactttggacttgaaaaaggaattttggttcgtagttttcagatgaggcaatgggctgtgagacatcaagagaccagcagctggcaggtggcagggcagaatgtgaaaatggtgctcagccatcaatgttacagtgctcccaagtgccactggcatctcaaccatcccgccattcccattttccatttccagatgctctacttgaaaggtcagaagagggaaccgatgtgctcaataacatcccatcatcagtcctcacactaagagtaagccaaaccaaaccaaccaatcaaaaaagtctacgcgcatgagtacctgctgtggaatcatagaagtcttgaagtctcccaggcttattctctaggtcttcatattctgaggcctgaaggatcatttcacactggtccagctgcttcacgaatttggcttcttcgctagactgagtctcatactcctaaggaaagagacatttaaaggttatgattaggctgccaggtagggggttctagggaatttcctacttgagtacatggagtcagaatcatagcttagggaacgaatattcaatcccaactgcatttctccacactgtacagatatttagagacacgtgtcttgcaggcacagattagcactaggactccatgcaaggacattcattatcactccacaaagaccacagagtgccctgggggaagtctcagacacttccaaattctcttcctgtcttggtttcaaggtcaacagtttttttttttttcctttaaagaaatttaattatatgtatgggtgcctgtgtgtgtgtgtgtggtgtgtatgcatgtgcagatgaacatgtttgtaactgctgtctaccatgtttgagacagaggtgggatctctcatcagcctgtggtttgctgcatgggcgaggaggccagggaatcccagagatctgcccatctctgcctccctggacttgagattacaggcatatttcaccattcttggttttaatctccctccctccctccttcccttcttccctctctccctcccttctttccttccttgtggtccatctagaataattagttaagaccctctgggttacaactacttgggacattagagagaattatgaattttacagacactactgtgtatgcatttttatggcaggagatggtgaatctggtgggaggggaggaacatttctaccttttctttcccactgtcccttctgagtgaaacggagttccaggggcattctcagagcagaacacatcacctgccacaacaagttccaattaatgctgtacagaatcattcttctattgaaagatcctgacagaatataaaaggtcacagaagccctgaaattggcaaaatagacttcattgttagcagaactagcttcactgatttagaaaaatagaggtgcacaatgctctggccactcctcgaacctgtgtgtctgccaatgttctgaccaggtgtgtgcccattgctgcacctcactgccaggtgtttgtgatattggttgctgggaaaatcaccccagcaaccatagttggggccaactgctgcaccttcattagactctttccttgtttccctcccatacccatttcttgaggaatcaatccttttagaatagatattgtttagatctggaaatcccctactccccacttctcctttcccccctgagggcctataaaaactgggtcctctttcccctcgaggttgactcctctacccctgcatgggatatgagttgtccccagagctctggctttccccgaataaagcctcatgtagttggcaacaagctccgtctatcatgagttcttgggtgtccgctattgtcctgaggcctgagcaaggggctcctctcagagtctttcactatcaagaccaaagtatccccaactggttccccacagaattcccatgtgtaattccaccacagatgtgttcagataataatttagtcctgctttcttggcagtgagacacgataaacaaatcactcaaaggcgtcctagttgcatttgaagccttattcttataaaggcagtcatttgaatttggtaagagctgaatcttacacagcggtatcatttaaacatgaagcctaatatattttgctttatctcaaaggcacttttagaaaattacattttatttaagtgttcattcatattcatagttatatagttacagttaaattcaggttcacaatttggctaaacatcactgaatactctaagcaaaccaatctagaatttcttttctgttcacagtaaaaaaaaaaaaaaaattaagagtgttcagaaatacagtatattgttgtgctggtcagttttttgtccgcttgacacaaaactagggtcacctgggaagagggaatctggattgaactccttctatcagaatggcctgtaggcatgcctgtggggaattttcttagtgattgattcaagaaggctcaggtctactgtgagtggtaccactccctgggcagatgctcttgaggtgtatgagaaaccagacagagcaaaccagaaagcagtgcttcgctgtagttcctggctctcctcttgcttcagttattatcctaccttccctcaatgatgaactattaccaggacctgttagccaaataagctctttcctccccaagctgctaccgttcgtgctatttatcacagcaacagaaagcaatctaatgccacccactgtatagagaatgctaatgaatttacagaatactttaaaagacatgcaatttgttgaattttcccttaaaaattcattgtaacggcattctgtaattttatctttcaacaagaagccatgggattggtgacatgcctcttcagtcagcaggtaaatgtgcttgtcaccaagcctgatgactggaacacaaatgataaaaagaaccaataacagtaagttgttctttgaccgtcacatgtgccgtgtcatacatgcgtgtacacatatgtacatggaaaataagtaaatttaaagtcagggttgggcaaagaacactgtagaccaagctcttggggtgagaattattctgacagttaaagaattgctgagaactgtttctcacatcagacttgagagtcataggacagaagaggaaaaggaaagccctaaatatgaaagcaagcattggtgttttcagggcccaggcttcctgtatggaatctcagcttactgagcatcgtgggcatcgtggtggggtcggtcccagaggaaggggcacattcagatttggtgttcataaagattactccagtttgcagtgtggggcagtaggtaaactggaagcaggaaaatcaggttctaaaatctgggcagcaaggacaggaaaatatggaagaatttgagaaatattattatgaagtgaaataaataaataaacaaactatatgcaagtgagagaagccactgacctccaaaagcctgcttaagactggcacctgtgtgaagaaagcactggggtacaaggtacacttagcaggcagtgggtgttcactataagcttcaagtatgcagaaagatactgggcaagattctgtgcacccaacagtagatgagcactaggagcttaaacaaggacagtccagtcctaagatactcactgtctgactcctgggtcatcttttaccagaacaaggacccatgctggcaagcgaataaaaactgagtagagtaaaggttatcaggattaagaaaagacctaagtatgggaaaggaaaacaaagttaagaagtccctttaaaagtctccatatttccctaatattacattattaaagcaccaatacaaccacacacacacacacacacacacactcatccatacacacaaacagagcaaaaacaacaacaactactaccctaggtgggagacctgaattaaatcttattccatcagttcaggaaatatgatttcaaaccgagatgagcaatggataatgccattggtcagatcccacacaaacttagcagatagaagagaaagtaacacacttcccatttacaccagaaagatattctcagatctgaaagtagatcaaacctaccacaaactactc

SEQ ID NO: 2522 - DNA, 1267 bp, Mus musculus
aggtaaccagcagcggccagtggtggccgccgccagtaccccgccccctccacgaatgctcgcgacacgcgcgccgggagagggcacgggcggcggggctagctgtcttccgagctcgggaatcgctaccatctgctgctctgcgaggagtccgcgtgttctccgcggtgctcagctccaaaccggccaccatggaggcgcaggcacaaggcttgttggagacggaaccgctacaaggaagagatggggatgcagtaggcagtgctgacttctctagcatgctctctgaggaggagaaggaagagctaaaggcagagttaattcagctagaagacgaaatcacaacattacgacaagttttgtcagcaaaagaaagacatctggttgagatcaaacagaaactcggcatgaatctgatgaatgagttaaagcagaacttcagcaggagctggcacgacatgcagaccacgactgcgtacaagaaaacgcacgaaaccctgagccacgcagggcagaaggcaacagcagctttcaataacgtgggaactgccatcagcaagaagtttggagatatgaggtactccatccgccattccataagtatgcctgccatgaggaattcttctactttcaaatcatttgaggagagggttgagacaactgttgcaagcctcaagacgaaagtaggtgggacaaaccacggtggtggcagttttgaggaggtcctgaactccacagcacacgccagctcacagaatgcttcagcaggctcccggcagaccaaggacgaggagctgcagtgctaggtcccgcctgggctgctgctggtcaatctgcctgctcatcctctgatatgaagaccaaaatcccactgggaaccccaagttttgacattgatatttaaatggggtctccaaaaagcttaataaaatgatttctttttgcatttgtgttgatgaccactactctggagtatttacaaatgtcatctttaaaaatagacaacctggagcagggtcataattgttctgaattcttgtctgcggaactcaatgtatttcccaatcatgcagatactgattattagctttggttttgacttggtctccaaaccaatatgcatgtctcagagtgcacctgccagtctgtagatcgacaggtgacactatttatgacggtctccagcagggcgcaaatcctacaaacttcaccaaattgcttgtgatttttatgtgcatttatttaagtcattaaaataattcatttt

SEQ ID NO: 2523 - protein, 204 aa, Mus musculus
MEAQAQGLLETEPLQGRDGDAVGSADFSSMLSEEEKEELKAELIQLEDEITTLRQVLSAKERHLVEIKQKLGMNLMNELKQNFSRSWHDMQTTTAYKKTHETLSHAGQKATAAFNNVGTAISKKFGDMRYSIRHSISMPAMRNSSTFKSFEERVETTVASLKTKVGGTNHGGGSFEEVLNSTAHASSQNASAGSRQTKDEELQC

SEQ ID NO: 2524 - DNA, 129746 bp, Homo sapiens
catgcaaacaggatagaagttctcactttgggctgcaggtttcaggcttttcggcttggaggtggggttttgccagggacctttccctgtctgcctagaatttctctgcctcctgcctctatcattaagacctttcttggacaatgatgttgtggctaagaacacaatacctcaatgtatggcactttggcatgctgattacttcgaactaaagaagattggaaggcctcagaagtaagttttctttgatcttcttctgctctcctgcttcctgcccttttgttttccccaaagagagtcaaagaaactaaaattttttttccccaatgtaggtcatagattctagaatccctgtcccagaaagcaaatcttaaaatccccaaaagtctcccttctttcttctccctctgtttccagagggatcctgcctaccacctggaaagaaggaatgtcatacagagaagcctagaagaattcaaagagccaggccttgctggatttcccccatcagtctgttaccaataacttatacccttttatccaattacatttcctcacagctgtccattcttcattgaacttaagcctaaaaacagtttcccctggattctagggtcttcatttctgaaggctcccatgtaacccaaatctttgattacataaatttgttatggtttgaattgttgtgatggttaatactgagtgtcaactggactgggttgaaggatgccaagtattgatcctgggtgtgtctgtgagggtgttgccaaaggagattaatatttgagtcagtgggctgggaaaggcaggctcacccttattcttggtgcgcaccatctaatcagctgccagcacagctggaatataaagcagtgaaaaacacgaaaacactagactggcctagcctcccagcgcttcctgcgcttgaacatcagattccaagttcttcagttttggggctcggactgactctccttgctcctcagcttgcagatggcctattgtgggagatcgtgtgagttaatacttaataaactctatatatatatatatatatatatatatatatatatatatatatatataaaattagttctatccctctgagaactcactaacacacttgctaacctatcttttgttgtaggagttttagcctgacccttatgatgggtgaggaaaggtatcactcctttcccttcctatggtggcatctgttaaggatgttaaggatgtgttaaggaagcaggtgaacaatgactaacaacaacagagggaaacaggaaaactccaagagtggctgtttgtggaaatgacggacaaaaatctccacccctgcctaggctcagaaggcattccttcagtgtagggatccccatattgtacagggtaataacttttacttgtaatgattctgagttgtcaagaaaaaggtactgctgtgtttctcacctgagagtgattttgccctccaggagacatgtggcaatgtagggagacttttgatcatcatgaccatggggctactactctctacctctagtgggtagaggccagtgatgttcctaaacatcatatagcacaacaaagaattatccagcaaaaatgtcgatagtgccaatgttgagaaaccctgcattaaaatctcagagatctaataaattttaaatgcattttagagattgttagtaaaagcaattatatatttctcaaaaagttttcaagggtaaaggaataagctttagtatatgggaacctcaggatacaactaaataatatgtccttttgtaatgaaaataagcacctttatcctccaagttctctgaatatccatgcattatttacagatccagtgaatatgtctagaaactttagtggaatgtagaaaagacaaaatttattcattaagctttgtgtaaagcatttcatgtaatgcattcaatttgttgggaagctacaactttttgagggataaacatgaaatgtttgtactttatgaaataattgttctttcaactggctgaataggggctctctttcaggcatctggtcaagatttattaatttttgttagtttttagtaattagaacagtctcatattggtatatgatctatatgatttagtcttctcaatgtcaaagtaaatcttttattttttttgaggtagagtcttgctctgtcaccaagggtggagtgcaatggcacaatctcagctcactgcaacctctgcctcccaggttcaagcaattctcctgccttagcttcccaagtagttgggattacaggtgcccaccacatgcccggctaatttttgtatttgtagtagagacggggttttgccatgctggtcaggctggtctcgaactcctgacctcaggagatccacccacctcggcctcccaaagtgcaaagtaaatcttatagggaaggaaaagtttcctcaaacctcctagggctcctggctcggtctgaaataaaaaccgacaaagacagattaacaggagaaaagcacatttatttaaccaaaagcaacttatttaatcaaagctttatgtgacggggagtcttcataaatgaagacctaaagacctaagaaaactctatttttatgcttaattttatgttcagtgaagaatggacagccatgaggaaatgtgattgaacagaaggggtatgatctaatggtcataggttgagaggggaaacccagtgatacggtttggatctgtgttcccaccaaacctcatgttgaaatgtaatacccagtgttggaggtagggtgcaatgcgaggtccttggctcacggaagcggctccctcatgaatggattagcaccatcccctttctgataagtgagttcgcggaagatttggtcatttaaaagtgtggggcacctcctactctctctctcttgcccctctcttgccatgtgatatgccgactcctgcttcaccttctactgtgagtaaaagctccctgtgacctcctcggaagccaagcagatgctgaagacatgcttcctgtacagtctgcaggactgagagtcaattaaacttctttttaaaataaactacccagtcccaagtatttaaagcaatgcaagaacatcctaacacaccaagcaaggcttggctgttggatgcttcttggcctcttggtgtggtgctcctccctccagggtgtggggcagaaccactctagaatgagggtcttgtgacctactatcagtcaaggtaggccaaataatttatggccagctcctacacagaaaggtggggcaaggttagaggaatgtatttgaatgctttgaagtgaaggaaagggacctagtatttggcatgccaatgtgccatactttggtgtatagtgttctgagcctcaacaatctcttttcctttcttctctcagcactgcttggaacatgtgtgtgtgtgtgtgtgtgtgtgtgtgtgtgtgtgtgtgtgtgtgttggaaggttatgatgcaaaagttagtttttgggtgtctatggaccctgtcacttctgggaaccagctcctcttgactaagtgtgtgggatgggaattgagaggaaggggaaaagaaaacccaaatgaccccatatccagatggatgaggttgacagtgtgttcactcaccagcagctcctgcaggccctggtggaacctagccaggccttgtgctgcacctctctgatgtccacttcacctctagctttcggcttcagtggtcctagctagtattcagccaactaatctcccctggcctcctccaaagccaactctctggtgggtagactccaatttccatgtttcctgagaactgggaagttggtagaggtggaaaaaaggtggtgctggtcccctttctgagcaatcaaactatctctcctcattccttttgcccagcttagtagtatgatgtggggtgaggtcagtaagtcctccagctaggctgagttctgaatgcctctccctttgtgcagcccctcctaccctcatgaaagattctgttgcacccttttcttcatgtggcttcaggaaatggaagctgcctttctccagcctcctggggatattggcttactagctagttctctctcctcactaacttccaccccctacctggggcttcaaggaaactcctctctggcttcctacaccacttgagagggtgaaaaattcaaagtgacaaagagcacttgttctatccctaaggtttctcaaaactatctggccatcagagttctcaatgcaattgtcgaggccaggttctctttgctctcatgggagtaaggagaagaagggtgaaatctgtagacagagccatgtctaaatctttcatacttctctgccctccccaatgtttttttcctctccaactcccctggaattaggggtaaaaattcttgtgctgcctgctcatatttctttttcattattttctgtttacttgggtgacaacgttttaatttaaaagctgagactatagaacctttcatctttgttgtggacagtttctgaaatggtcattgtcaatcttggaagcacatcagtatcaccgagagagatttaaaaagacaaatcagaatacttgtggggtagaacccaggtatcagaaatgtttaaaagccactcatgtggtgctgatgtagaagatgactgggaaccactgctttaaaagcacaggtgcccagtgggataggagggaaagaacatgcccattaatacctcatatagcatcgtgacacaaatgcagaaagccaggcacagagagactgagacaattcctttaggtgatacagctggtagttttcagagtgggaatctaatggagccccaaagctcatgttctctttcaatgtatttgtaaagttcataggccagagcagcacacttcacctgtcctttctactccttcctctcatttctgtgccctgtccacctcccacgatgccttcagacccatacattacaagtgaccgggaactggtgtaagtaaaaactgttgaatacacatttcctttggacagttgagatttctactgcatttcacccctatagaatgatcaactttctaaacaaacttcgttcttatatgagttatagtgctatcggtagagacctgagttgatatttcttactccttgtcatgctttctaatcgcatgaccaggcaagccttgggacaggactgtgagtttctagtcttgtctgaaaacatgactgtctcatgttaatgttaatgtcaacaccaatgttaatgttaaagcaacaaaatacattaagtaaggtatttttaaacagaatttcattgattcaatcaaacacttgcacagcgttttgcatctggagtggccatagagacaaaggagagggtgaaggtggctgttttaataagctttaaagaagttaagaaagttcaccatcttaaatgacaaggaaaagacaaagaaaagacaaaatagaaaaatcttcatttttataatatgttaacttcaataatagtcttctttggctaaaccattattagggggataacacaaacttgcctgactaattcctttactcttaagacacagctgaggcaagcattttgaaagaaacatttctgtacttctcaccagcctgagttaggaggcttccctcagtgctcacagacgcactgggcttaccctttatgcacagcgcttaccacgaggcgctgctttataaaaaacctgtttatccctccttctcaccagatcatgaactccctggtaaggaaggagcatgtccttaacccatacccttagcatctagcacagtccctggcatatagatgttcaataactattttggaatgaataccaatattttattattataaataatgattgaaaaattaaaagggtagcaacttaaaatgttataaatcagaaaaatgagtcagagtgtagatgaaggttagatgactcaagctgggaagtcattaactatttttagctcgttttagcagcagggagtcaaccctaacctggtgtttaatttccagggtatagaagaccagaacaacggaatagactttaaaagtgatttaatcactgattcttcacttcatgcatccctggtcactattaccaaaagtcatttaaaagccttatgcttagtgttctacatagtaattttaatggcaatgattacaaatcagtgagatcttcaacataacaaaaaccacactgaggtgctcgtacatgtgccaggaaaccatgagtagtattccttctttcaagaaaaaaatgtaagactccatttatgtttattagtctatactgtgcaaacttgggcatggataaaatataacctactggttagttaattgtttattcaataaatctttttgagctatgaaatttttataagactttttgtcaggaattatgggaggtttaacataatatccacactcaaacctgacagactttaccatctattttaagaaaggaagaggaaacaaaaacccaagtggcaaactattcaagaccaaatgtaaataagtaccacattgtattttacagatgaagatcatgtagatgttgagaaaaaggggagatctgtaacatccaaagccagaggagtagagatgggagctgatatttcttactccttgtcatgctttctaatctcattaccaggcaagccttggaacagggctgtgaatttctagtcctgtctgaaaacatgactgtctcatcaacctgcaagtacaacctacagggactcatggatagagaccccagaagattcaagtttcctgctgaggaaaagcaaggcagctctgccttcttgtttcatctctccagtctataaacaaaccttttttttttggtgatttttctgggccccccaggatagcattgaagtactgtctagtgttcctaggtgcaagaaggttgtgatgtgccttagagagaaaatatatatgttaaataagcttaataaacttgattctggtatgagttttagtgctgttggctgttagctcaatgttaatgaaacaacaatatacatgatacacatgaaataaggtgtctttaaactaaaatatataaagaaacaaaattgtgtattgatcagttgacaaaaatgttagaaccacggcttgtggaaacctaccttcgtatctccactaagagtgatggctcagtattgtaaaaccatgttctcttcctctgtccagggcatagtatcagacctttacaggcacaacccgtcttattgcgcttctcttaactgtgcttcacagacactgcatttttttttttttgatggagtcttgctctgttgcccaagctaatctcggctcactgcaacctctgcctcccaggttcaagcgattctcctgcctcagcctcccgagtagctgggactgcaggcgcgtgccaccacgcctggccaattttttgtatttttagtaaagatggggtttcagcatgttagtcaggaaagtcttgatctcctgacctcgtgatccgcccaccttggcctctcaaagtgctgggattacaggagtgagctatcgcgtttttaacaaattggaggtttgtggcatccccatgttgagcaaatctattggtgccatttttccaatgccatgtgctcacttgatgtctctgtgtcacattttggtaattctcacaatatttcaagctttttcattatattatatctgttatggtgatctgggatgagtgatctttgatgttaccattgtaattattttggggaaccctgatccatgcccgtataagacagtgaattgaatcaataaatcttgtgtgtgttctgactgctccaccagccagccatttccccatctctctccctcttcttaggcctctccattctctgagacacaacaatattgtagttacgctcattaataaccctacaatcgcctccaaatattcacatgaaaggaagagtcacatgtctctcaccttaaatcgaaagctagacatgattaaatttagtgaggaaggcatgttgaaagctgagataggccaaaagctaggtctcttgtacgagttattcaagctgtgaatgcaaaagaaaacttcttgaaggagagtagaagtgctactccagtgaatacacaaacgataaggaagtgaaacagttttcttgctgatatggggaaagtttgagtggtctggatcaaacccgatcaaagcagtcacaacattctcttaaccacagcctaatccagggcaaagccctcactctcttcaattctataaagcctgagagaggtgaggaatctgtagaagaaaagttggaagctagcagagactggctcatgaggcttaaggaaagaagtcatctccataacatgaatgtaaggtgaagcagcaagggctgatgtcaaagctgcagcaagttctccagaagatctggctaagatcattgatgaaggtagctacacgaaacaacacattttcaatacggatgaaacagccttatattggaagaagatgctaccaaggacttttacagctacaaagaagtcaatacctggtttcaaagcttcaaaggacaaactgactctcttgttaggggcaaaagtagctggtgactttacattgaagccaaagctcatttaccattctgaaaattttaaagcccttaagaattatgctaaatatattccacctgtgctctataaatggaacaacaaaacttgaatgacagtacatctgtttacagcatggtttattgaatatttttaagcccactattaagacttactgctcaaaaaatgtttctttctaaatattattgcttaatattggttaataatatactttgtcactcaacagttgatggagatgtacgaagagattaatgttgttttcatgcctggcaaaacaacattcatcttgtagcccatggataaaggagtaattttgactttcaagccttattatttaagaaataaatagatagctgccattaatagtgattcttctgttggatgtgggcaaagtaaattgaaaaccttctggaaaagattcaccattctagatgccattaagaacatttataattcgtgggaggaagtcaaaacgtcaacattaacaggagtttggaaaaagttgattccaaccctcctgaatgactttgggagttcaggacttcaaagcaggaagtaactgcagatatggtagaaatagcaagagaactagaattagaagtggagcctgaatatgtgagtaaattgctcaatctcataagacttgaatggttgaggagttgcttcttatggacaagcaaagaaaatggttacttgaaatggaatctactcctggtgaagttgttcacagcattgttgaaatgacagcaaaagatttataattatataaacttagttgataaagcaatggcagggtttgagatgattgactccaattttgaaaaaagttataatgtagataaaatgctatcaaccagcattgcatgctacagaaaaatctttcataaaaggaagagtcaattgatgcagcaaacttcattgttgtcccattttaagaaattgacacagctattgcagccttcagcaatcactaccaggatcaatcagcagccatcaacatccaagcaatgccttccaccaccaaaaagattcccattaggtgaagatgatctttagcattttttagaaataaaatatctttttaagttaaggtaggtacattgctctttctagacatcgtgctattgcatacttaacagactacagcatagtgcaaacgtaacttttatatgcattaggaaactgaaaaattcgtgtgactcgttttgttgcaatactcgctttattgcgggggtctggaacctaacctgcaatatctctgcgttatgcccttatagcgccgggagtgggtgccttccgccggctgtacagagcgccggcaggtggcgcccagcggcgagcttgttccagcttggtttgggccaggtggactggaaggggcggaggtaaccagaagcggctagtggcggctgcctgcgtccccaaccccctccgcgcagcgctcgcgacacgcgtgccaggagtgggagcgagcggcggggccagctgcgttctgagcctgggcgcagctgccatctgctctgggaagcaccagggtgtccccgccgccctcagctcgaagtcagccaccatggaggcgcaggcacaaggtgagtggtcgccgatcgccccgagagtcaggtcctggggcgcgcataaaggctcttttcctgcaccacctaacttcgctctcggacagaacagattggtgccgtgttgcacatccagaactccactcccacccgcgcctttggtataatgcctgctgcccaaactcaggatttgctgtgggtctggggatcaataaagtgacaggggatccgtaagtggagaggcccctcctcaggaaatgcgcccgtggaatgctctaccctcttccgcagccagtcgcccctggccttcccaacctcgcggctgcccgaaggacctgttgtgccgggtccggaaagcgtgtttcgctccctttcccttgagggagtggggagggaatgtgactcttttcgcccagcgccgtggactcgcggcttgtggctcccaagttagggagtgagaggatcgcccgccgagggggtggctccgcagcccggctgcgcgagacgcttcccgctcggggacccgccttccgaggccaggtgaacgttaccggccccctgacctccagcagatccacacgtgagtcccggtttccgcgatcggggagcgacctctgcctcccgtggcgcgcggggcccccggccgcccagctccctgctcccggggctgcctgctggaggagcctgcggtggcttcaggaagggcggcctcatatcttggggtcacacttggaacagggttggggaattccgatggaatcgttcaagaatgggggtaaacggaccgtggaaaggggcagaggtgggcggatgtggagcgagagacaagtgggaaggaaacggactcagtgatctaccttggggagcaacgcccagaagggatggcttgcggagttcagcctttaaggcaatcaaagccaccattcttttacacagtaggaaactctgtgttggctcttagtatagataaaatctcattaaaaagaaaaaaaaaaaggttcatgacctgatgcgctcgccctctaggggcagaacgccctgaatgagagtgggttggcgattgcgtgggcctggagtcgcccaacaggtttgctgccaggattacaattgtctgaacagcacgaaccttactcgtttgttccatcctcctaagtcctgcccgtaaagctgccgcttcccatattttttcctctattatgtagataggaaatgataattcaaccaagggtgagggcagttggtcaaattcaaaagcagaggtcaggttggaggccttcacgccagaactgaagctggtgggagcagcaccggagctttccaacctgacttgcatattagaattatttagagagtcttcattactggccttggccaaccccatcccagtcaaactggaatctttggaacctgaacatgggtatatttgaaagcttatattagtgaggatggagaagaactatagcagataggaaacattcatacaacttctgaagacatccgaaactacagactggtaaccactggtgtcactggtttgctttattgctttgctttacttccaagatttacttaacaaatatttcagtgctttcctttgccaagcactgtgctaagaagagcaaagacagacttggtatctgcttcataaaatttacagtagaggaagagacaaatattaatttgatagctatttgaaaaataacatgtaaaatcactgccatgctgatgctaagaaagggcctcatagtgcagcgagagcctgaaaaactataaccctagtatgcaataatcagaagagcagattgtttattgtgtccctgtctctgttcttcgtgctttgcatgtattgatggactcatttcctgtgcgcagcagtcccatgaggtagttcatattctcattcccattctacagagaggaaacaagcatggaaggtattaggttggtgcaaaagtaattgcaatttttgccatgactttttaataagttccttgtttacagccagataggtaaaaagtagcaaagtggatgctgtgagggacccattctcactcaaagcctatgacttttggaggaaaggtaaaacttcagtccccacctgaatctccagctgtcctgtggtgctcttcctttcccctcatgactggatggaaactttaggtgtaaagaggactagtaaaaaggcaaatggatatgagaaaagtgaacagatttaataaatacttaagaggccaggtgcagtggcttacacttgtaatcccagcacttcgggaggccaaggtaggaggatcacttagagcccaggagttcgagaccagcctggacaacatagagagacctcatctctacaaaaaataaacagaattagctgagtgtggtggcatgtgcctgtaggcctagctacttggaaggctggagtgggaggattgcttgaggtcagaagtttgtggctacagtgagccaaaatcccagcattgcactctagtctggacaagagtgagaccttgtctcaaaaaaaaaaaaaaaaaagagagatacaaaaaaggccagccacacctgtaattccagcactttgggaggctggaggagacagattttttgagcccaggagtttgagatcagcctgggcaacatggtgaaacgctgtctccacaaaaaatacaaaaattagctgggtgtggtggtgcgtgcctgtatcccagctatttgggaggttgaggtgggaggatcacctgagcccagcaggtggaggcagccgtgagctgtgattacatcactgcaccccagcttgggcgagagggcaagactctgtctcaaaaacagataaacaaaaagagaataacaacaaaaaaacttaagaaaagtcaaaattggattgaatgtgaaggagggcagtgtcaaggatgaccagcttcctacttgtacaatcaaatggaggataattacctcttaaatctttatttgcctagcattttaagattttcattttcagactttttgttatttataaagcagagatattgagttatttaagaaaaaacttctcacaaactgtttatagcatatattaaagggaaatcttttttccacttgcacattttttctggctaaatgaatgatttgcctcttagattctagataagacagttctgtgatttttaaagtgtaagtttccaccttcagcacagtttattttagaattacctagagtggagatggcttgtctttctgcctgctaatctagagacaggtaaagataagtgagattaagcaggcagttgctgatgagttgtacctcatattgtccaggaagacaccaaggtgttatggacatgattcgcccatatagctcagtaagtgcagcaacttactgcactagaaactttcccataagtgaaattatgcaaatatgttctttgactttgtaaaataatagattacttccagcaaaacaagaggactctcaggggaggtggtaggacactaaacaggaagtgggattatgggtggagctgttcactgaggagggctggagaacaacgtggagagagatgtccacaggagaatggcattcctatttgctttcctctggtaccagataattttgctttaagacaactgatatgttagagagggaattgggttggaaatgtagcattttcccgaaacatacagtagtcctttaaaataaaaacttcctgatccttttaaactacccttcaatattttattattctaaatggaaataactttgttgttttcacctttcccaacgtctttaatgttacaaggaaaactgtctccttttaacatttgcatatattcaaattaataactatgttagtttctcatggccactgtaaaaattaccacaaacttcgtggcctaaaacaattaacatgtgctgtctcattgtttggcggttagaattccaaaggcactatcactaggctgaaatcaaggtgtcggcagcgctgtccttcctctggaggctctaagaaagaaatcgtctttccctctttcagttcctggtggctgccgacattcttgggctgcatcactccaatctctctgtctccgtggttatgctgctttctgttctgttcgcatcaaacctccctctgcctctctcttataaggacacttgtgatttcatttagcacctacctagataatccaggataatctctctctctctcaagacctttaacttaatcacacctgcaaaaggtaacatttccaggttccaggaattaggatatatttaggggccatcattcagtttactataataactattttttatatccactcaagaagagtctcagatgtccatgaatgaaataaagcaataaatatcagattaaccctactgtttgcaaagtcctttaaatgaaaatgtcattatactttacattatactttatacttacattataagtatacattctacattatacattatactttacattatactttataccttacattatactttgctcacagaacatttatataattttatcttgtttcaggaagtacataaggcagtttatatggatacttgaaatgcaacaagataatgtaaattaaaaatagatgaaagaaaataaatgaggataagaagagaaaaggaagcaagggatgaagctctagaaaaatgaatataatcacattacttttattgatattgcatggaagataaattcttactttataaaggaagtatggcattttgttataaaatgataaaagaaccattcttccttctgtcaaacagcagcaggtccagtctcttatacaggcataccttggagatagtgtgggttcagttccagatcaccccaaagaagtgaatattggaatacagcgagtcacacacgttttttggttttctagtgcatataaaagttatgtttatactatactgtagtttgttaaatgtgcaatagcatgctatctaagaaaaggtacatacctttatgtaaaagatactttttgctaaaaattgctaacgatcatttgtgccttcactgagtggtaagtgttttactggtggagggtcttgcctggatgtcgatggctgctgactgatccgaatggtggttgccgaaggctgaggtggctgtggcaatttattaaagtaagacaacgaggaagtttgtcacatagattgactattcctttcaagaagatttatatatagcctgtaatgctgtttggtagcattttgtctgcgatagaacttctttcaatattggaatcaatcctctcaagccctgccactgctttatcgactaaatttatataattctaaatcctttgttgtcatttacacagtgctgtgaacatcttcactgggagtagattccatctcaagaaaccactctttgctcatccataagaagcaacacctcattcattcaagttttagcatgagattaaaatgtcataaatttagttacatcttcaggctccacttctgcttcttttgctgtttctaccacatctgcacttcatttcctccactgacatcttggacacctcaaactcattcaggagggttggagtccacatcttccaaactcctgttaatgttgatattttgaccacctcccatgaattacgaatgttcttaatgacatctagaatggtgaatcctttccagaatgttttcaatttattttgcctagttccaacaaaaaaatcactatctatggcagctgttttcttatgagatgtatttcttaaataatacgacttgaaagtcaaaattactccctgatccacaagctgaagagtggatgttgtgttagtagacgtgtgagcaatgttaatctctttgtacatctccatcagaactcttgggtgaccacgtatgatattgtttggctgtgtccccacccaaatctcatcttgaattgtagctcccataattcccacatgtcatgggagggagccattgggaggtaattgaatcataggtgccggtctttcccatgctgttctcatgatagcaagtctcacgagacatgatggttttataaaggggagttcccctgagtatgtcctcttgcctgccaccatgtgagatgtgccttccatcatgattgtgaggcctccccagccatgcggaactgtgagtccattaaacctctttttctttacaaatttcctagtctcgggtatgtctttattagcagtataagaatggactaatacaggtgtgttatcaaccagaagtaatattcagaaagaaatattttttttctgagcagtagttcttaatagtggacttaaaatattcaagaaaccatattgtaaacagttacccaggctttgttattctatttatagagcacattttctaaatctatagatttagaataattatttatttatttgtatttgcattttcatagatgaaaggtcttgctcggttgcctaggctgaagtacagtgggatcatcatagctcactgacaccttgaactcctgggctcaagcaatcctcctgccttggcctcacaaagtgttgggattacagtcatgagccactgcatctggttacagttagaataattcataagggccttagaactttttgaatagtaagtgagcatgtaacttaaagtcaccagctacattagcccctaacaagagagtcagcctgtactttgaagttttgaagccaagcatcgactcctcctctctagctataaaagtcctagctgacatcttcttccagtgtaaggctgtttcatctatatgaaaatgtgttgtttagtttagccactttcatcaactatcttagccagatcttctggagagcttgctgcagctttggcaacagcccttgctgcttcaccttgcacttttatgttacagagatgactttttttttttttttttttgagatggagtcttgctctgtcacccaggctggagtgcagtggcacgatcttggctcactgcaaccttcacctcctgggttcaagcaaattctcctgcctccgcttcctgaatagcagggattacaggtgcgtgccaccacgccctgctaatttttgtgtttttagtagagatggggtttcaccatgttgtccaggctggtctggaactcctgacctaaggtgatccacctgcctcagcctcccaaagtgctgggattacaggcatgagccaccatgccaggcctgagatgacttctttccttaaacctcatgaacaaatctctgctagcttccaacttttgttgcacagctttctcatttctctcagccttcataaattgaagagacttaggaccttctctggattagactttcacttaaagaaatgttgtggctggtttgatctatccagaccactcaaactttctccctatcagcaattagtctatttcactttcttatcatttgtgtgttcagtggaatagcatgctacgtttctttcaagaacttttccttcacattcacaacttgaatcaagaggcctgcttttgatctatcttggctttcactgtgccttccttgctaagtttaatcatttctagcttttgacttaaggtgagagatttgtgtctctatgtttcacttgaatacttagagactattatagggttaattggcatactatcaatattgttgtgtctcagagagtggagagggccagggacagggagagagatagggaaatgggtggctggtggagcagtcagaacacacacaggatttactggttaaggtcaccatcttatatgggcatagttcatggttctccaaaacaattctgatggtaacatcaaagatcaccaatcacagatcaccataaccgatttaataataatggaaaagtttgaaatattgtgagagttactaaaatgtgacacagagacatgacatgagcccatgttggaaaaatggcaccaatagacttgcacaacctggggttgccacaaaccttcaatttgtaaaaataatatctgtgaggtacaataaagtgaagtgcagtgaggtatgtctctaactattaaattatccaaggaaaaaattattttgcattttatgtttcatatttaaaattttgtattgaagtttaggcaatataataataaacctcaaactatggaagcaagctgttatatattttgatttatgatttttaagagtattattaagactattcatacaattttcaaagttacctcctgtagttttgtttcctgtttaagtaaaggttttgaaataggtgatgatgcatattttaggtgaagtcagtcatttgcaacaaatcatataccactgttttattttaaattattttaaaatctaattatacaaatggcagctgttgtagtagatgggaacatattttgaattgccttccctgttatacaccttattaattatctgggtaggcagaatctgagaatttcttcaaaaacttataagcaaaggagtccatttttgtggcctataagaagatgtgctacttagtaatttatagtaaataataaacaaatacttcagcagatattgattcattaaatattttaataaatacttattgattactgcagtaatagcaaatatttgacaagcacatactattgggagggaaaagggcatagtgattaagatcccaggatgaaggtaaactgcctggattttaattctgacatgttacttaccattaatatgaccatgaacaagttattcatttcactcaatcttggtttctacatatgcaaagtgaagatagtaatagctccaatatcataggattgttatggggatttaacatgttaatacaagcaaagtgcttaaagcagggcctagcacatggtaagtagtatataaatgtttgctgttgcttttattagcatatgctgaaaactttgcatccattattttatcaaaaccttataataacatcatgaggtagatacctttacttttaactcattttataaacagggaactacgagtcagaaaaattaaatgaagaagacaggattcaactccaagtttaattgagtccagagaatgagcttaactactatactgcactgtgccttaatgtgtgctgtgccacacgtgcaaaggggaagctaagatgaacttgacatggtgtcatcttttcaggaggataggcaaaaaagagttgagagtcgttcctgtgggttaacacctagaactaatgagaggacatatttccatcccaatgggattttttgagtgctaatgtgctaattagagctaattcacattgagggtgataatagcaataacattttagtgtttttacaaatgtcaaataccatggcatgcacttttttaaaaagcatgttatttagtcaggtgcagtggctcctggtactttgggaggccaagacgggaggatcacttgagcccaggagttcaagaccagcccagacaacatagcaaaaccctgcttctacaaaaaataaagaagtaaattgggcatggtgatgcatgcatgtattcccagctacttgggaggctgaggtgggaggattgcttgagcccaggagtttgaggttgcagtgagctatgattgcatcattgcactctagcctgggctggacaaagtgacaccctgtctaaaaaaaaaaaaaaagaacaaaaacaaaaaactccaaacatgttatttaataagtacaacaggccgggcgtggtggcttatacctgtaatctcagcattttgggagcctgaggtgggcggatcacctgaggtcaggagctcaagaccagcctgatcaacatcgtgaaaccccctctctactaaaaatacaaaaattagctggcgggcacctgtaatcccagctacttgggaggctgaagcaggagaatcacttgaacttgggaggcagaagttgcagtgagccgagatcatgtcattacactccagcctgggtgacagagtgacactctgtctcaaaaaaaaaaaaaaagaaaacaaaagaaaaaaaccaataataataacaaactcacaaggaaggtaacattttggttttacagatgatgaaactgaatgacagactagttacacaacattctccaactcatacaacttggaagtgttggagttgggatttgaaatcagaaagtttgacttcatatcttgagatttcaattaccattctataggtactttgtatgcacaagcagtcagtgtgcaaagttttaaataatggttttgctttattttctatatgatcaaagaggctttaaacgggcagaatttaattgtacagttcatttcatatgtgggcagggtctaagtctgggaatatgaatgggactggagatctttaagagtaagccttgcgacatgtcaagttgcgggtggaggatgctcatttatcaacagcttgctatttttgttctgttttcaagatgaagaattctataaaaatcacatgacatgtgattcttaaaccaatacagaattttatcaccagctcaaacaaaagtcagttcagatatgttattccacttggtgttcatccatattcagtcatctcaggactttaaaataaataaaagtcacaggctctgcatgcttctttccagaaagtagaatctgtattctttagatgctggctgaaagggctaatttcaatgagtaccccaaaaaagaaagcattttattgcctcatgaacattataattacttgtttacacgaatatgttttattcatttaaccatctcccaaccatactagcagaataactactttaagaaaatacctagtaaaactgttgaaaaaaatgagccatcaatggatttgtccttaagcgactctagccatctctgtgttgaattttcacggtttgaagcagcaactgcagaaaagagggcatctgcctcagtcattgatcagctggcatgctctccatgcaggcagaggttcaccattacttctgttgtgaaatgtccccaacaacaccgtaaagccagtcacttcttcaatttactgagttaagctgatcatggtggtgagtgcttatagtcccagctaatcaaggtgctgaggcagtgggaccacttgagctccagagttcaaacccaggctaagcaaaacccctgtctcttaaaaaaaagatatatatatatattttaactgtatatatatagttttgtatacatatataaaactaaaagaaaaaagtaaaacaagaaaaaatttactgagttactacacagttaagaacacataaaaggtgacctcaaaatgtggatattcacatctgtcatcctacttttcattgaatatttaagcaataaagtgtaatgatttgaaatatatgcattaaattgagaagcattgttaatgtaccagggaaggcaggagaatattttaatgaatttgaaatggctaaaaggaagctttgggtcctcaaggaaagatgaattttaagcaatttctcacagtgtgaatcgtttataagtgatgcattttgatgcagaggaagtgaagttcccagaataaaaccacaaatctccaagaatacccttagtcaccaacatattgcttctttctcaaaaggcaaaaatctagcactttgctgtagccagatcatgtaccacacatgaaaaatgcatgtatatgttacacctcatctccaaacttacctatggttatttgtatcttatacaaattacagtttccctgacatatatctaaaatatggaaaactcttcaactccttggaaatacatttttcttataattagacatttcttttgtccattaatagcaagagcgtcttgtcaaggatcatggaagcagaactgattcaagattaaaaagatccgtaaaagtcacatgagatgtaattcttagaaccagtatagagttttatcaccagctgctaggaaaagtcagttcaaatatggaatggttcaaatatgttattctacttggtgttcgtccatacccagtaatctcagtattttaaaataaataagtcataggatctgcgtgcttgtttccagaaagtaggatttgtatcctttagatgttggctgaaaggactaatttcaatgagtacccaaaaaaagaaagctttttattgcctcatgagtattataattacttgtttacatggatatgttttattcatttaaccatctcccaagcatattcacggaagcagaactgattcattcaaaagaaaaagccaatttgggatgggggtagtgggaggagatctcttcagatctctcagttttaaagtctctgatggttggatatttgtagtttttcactgatttttctctctgcataaagagctaatagctcattgtctataaatattttccaacattttgttttccaaaatggactcatttctacataaagacgtcatggaaagatggtttttcttcctgaagggttaggtcagccctgggaagaagtatagaccttggctcctgttattcctctttagatatcccagggttccaacaggaagttacaagatacctgcactacctgtaaagtttatttaaaatgattggaaggctctcataagcattggaggggaagaaaaactttttttctaccctcttaggtgaagtgcctaggagcctgtgaattaaacttacagcagacagactagcaggagaaaaagcttacaaagttatttattttaaattttgcttgcacaagggtgtcatagaaagaaatgaataccccaaggagtgatgagatttgattttctgtatcattttactacaggaaagggaggtggagaaaaggcaatattgagagagcaaatgacttctttaaaaaaaaaaaaaaaagataaatgggtccttaggagaatagatgggagatatgacagtttgtgacaatgtctagaagagaagaaagagttgctcccagtgggaggaatttgtgacagctgagttcttttgggaacctctgcttttagtcagataaaggatttcgggaactcaaatgccttcagctcaaaataactcttatgggctgggtagggtggctcatgcctgtaattccagcacttttggaggccgaggcaggaggactgcttgaacccaggagctcaagaccagcccaggcaacatagcaagacctcgtctctactaaaaataataatttttaaaaattagccaggcgtggtagtgcatgcctgtagtcccactactcaagaggctgaggtgggagggtgacttgagcttaggaggtgtttgtcccactgcactccagcctgggtgacagagcaagaccctgtctcaaaaaacacaaataaaacaaaaaacaaaaaaacacctcttatggcaaagtggcatattttggggtggaaaacgctgattcctttcagcacgcatcatttgctcatgttttacccaatatatgaagggcattaccggaaaggaaaatacctgtttactcttggcctactgtgtatctggtgtggcttcattcatttataagatgttccaccaggctcttgtagcccattctcaacaacagtagccttcaaagaaggaagtatattctgagattaggacttgtaattttcacgtgacaatttagagaatatgtagaaataagaatacacattcagaacgtgtttgaaatattgttacaaatgtttctgaatttttacaattttcaaagaaacctgcatgtagaaaatatgagggtgctattcatcagtcagaagacatgtgattacatcgtgcagtgcttaacacatgcactttacaggtcctcctaccagtaggagaagacaccaagactccaggtcctcctttacagaagtcattgtggcatccacagggtaggaaagccccatactcagcagtgagcaattttatacatttgcaaagcaaatcttgtactaaaaaaaaaaacaaaaaaatggggtgggttgagtaacagtaaactatcataaaatatacatctgaaaagagattcagacatactttagaaaagaattaaagtcacaatatatttgccacctcgaattaaattcatttgattatggggttggtgacttctttcattaagtgatggggaaatagatcagttctatcaagcactgccagtttatcacttactatctcaaatctttcagttagacacaaatagaactttgtatgacctttgctaatggagagcaacagtagaaaattattcatcccacgttttgggtacttactattaaatatgcttgtttgcaatgacctaggaattcacaacatatgcaagtacaaaacctaccttattgtgacatctggcctcaggaagagaaagaacttggtgccagtgttctttgactcttgacccatcataacgggctcagtaacctctcccctcagatgattccctgagacccaccacagggatatcttctcttcttagtaccctcttctctgagtaccctcacccctcaaatgatatcctgagactcacctcaagggggatcctctcttctcagtcccctctcctctcaaatggtgtcctacacctgcctctgtagaacttgcttctgtccttctcagatttttttttttttttttgagacggagtctcgctctgttgcccaggctggagtgcagtggcacaattttggctcactgcaagctccgcctccctggtgtacaccattctcccaccccagcctcccaagtagctgggactacaggcgcccgccaccacgcccagctaatttttgtatttttagtagagatggggtttcaccatgttggccaggatggtctcgatctcttgacctcatgatccgcccacctcggcctcctaaagtgctgggattaaggccttctgagatttttatttgttctttttatcccttctcccatactgagggaaaataaatgttttggtttatgtagtaggacctgttatgtatgtttcaaacataatggccccatataatagctttgaatttggattccgttagagttggaaaaagagaaagtcagcactcacttgcatgtgggcgctttcttgctccctctttctttgtgccctccccttcctctctctacccctgctttccacctccctttctctctctctctcaaagtaccaagtccagtgctgtattctcagtgctcatcttcactgacctattagcatatcttggcggggttgcccactatctgctccttaaagcactttgttcacttggttttcaggatactgaacagttctcctccttcttctcagtctcctttgctagctgctggcctgccccaaggatccgtccttggcctgcttcttctttctatctacactagcactgtttgccatctcatgactcatgattttgaattggatccatgtgctaacaactccaaaatttatttttcctgcctggacctcacttctcaacttcagactgcctacatgatacgtctgcatgggtgtctgatcaacatcttgaactcaacatgtctaacactgatctcctgagctccctcctccaaaatatccctagtcctcctaagttcatcctcatttcagttaatgacaactccatttcaaatgcagaagcccaaaacctatcatccacggtttagctttgttttccctccattataccccatttccagtctgtcatgccagctctactttcaagatgtagccagaatgggacagcttcctaccacctctgctggtattgccttggtcccagccttccttatctcccatgcgcattactgcaggagcctcctagcaggcctccctgccttggtcctggactgccttcactccattctcaacatagtaaccagagtgatcctttcactcatggtgtatcatgacactccttcctttgaagttctccggtagttcttcaattcacacagaataaagggcaaagaccttacagtggcctttccttcttcctcttttatttcctggacctcatttcctaatgctctctcccttaattcccttcgcttcctcttaggaacctttgagtttattaatccctcttcttcaagacgcttcctcagatatcttctgggcctgcttcctcactttctttggttttttacctaaatattgcttgtcagtactacccttagatctggcaactggacccagatctgttgggacagacagttatctctgggtttgtcaagtttctgcacaacacgtattctgatcaaaggtatgaacagctcattttccctggactctcttttccaggtatttgcatgtcactcacagcaatagcagtagccacaataacatcattctaccagttctctgaggctcaattccaaaaggatgtgacaaggggcaggtattgcctattaatgcagtcaggtgtgttacaggagagtaacactgaggttaggaaacaccgagattaggttgtgtaggggctattatgtagcctagaaaaatagaaatttttctcttaggggcagatttatttactatccaggataataaaggtgataaagaccagatgttgggcagatttgctggtagctctcatataaatcggagtttcctaatctcagtgttactctccagtaacacaccagcctgcattaacaagtaatacccagcccttgttacatcatccttttggaactggggctcagagaactagtacaaggatgtttctctggctactgctattgctgtgagtaataaattgtcttttgtctatgacccagaagtcttgtgtcttctgccaatatccatgaaactggcaggccaatgtcttggcttgcaagtagggtaaaattctgacccttcttatttctaacacctgttcagagcctttggttttagagagccccactttagccctcttctagctgagcctttgtttagagtgagcagctcgtaggctcacctataacctgtgcctcctcttctagaccatgttctggtatctgagactccagaatcccctttccaaacagccctgagagtgttaccaggcatccatgagcctttcgtgggtagactatgctgccagaatgtgtattcctcatcccaagagatgaccaagggctggctgattttgggggtggcaatgagagtagcttgaacacacaggctaggaaactagttctcaggtgtgattcctcgaccagcatcattagcttcacctgggaacttgttagaaatgcagattcttaggccccacccatttctgtttctaccaaatcggaaactttgagaatgagccatttgtgttttaacatgcactctaggagattctgatgcccacttatgtttgatgatatgatgtacactcaacagactaggttatccacatacatgtgcataaggcgcctatcaatgcttgtggcagacagaccctaaggtgacccccagtgatttccagcttctgttattgatattcttgtataatttccctagttagagcatgggcaagacagtaacttgcttccaaacaacagaatatgacaaactgatgggatgtaactcccatgattacattacattaataagacttcgttttagcagactggagctgaggccctccttgtgggtcgatgaagtaaacagtcgagttggagaaacccacatggccaggaactgtgggcagcttctagaaactgggtgtcttttaggacataaggaaggcaacaaaaacctggttctttagttttgtgcctccagaaagtgagttctgccaacagtctgcatgagccttgaaacagttctcctctggtccagcctctagatgagagtgcagtatggccgacactttgactgcagcttcatgagaccctgggcagaggacccagctaagctgtgcctggatttctgatccacagaaactctgagataataaatatgtgttgttttaagcagctaactctgtggtcatttgttatgctgcatttgaaagctaacacagggcagggctccgtgtgagaggagaggatgggatgtatatttttttttgtgctcttgccttgccttgggttctgcaagtgttggtgatggtctgtcacggcccttctatttaaaacggtacccttcccctactgcctccttccctccctccctcccaccttctttctcttctttctttctttctttctctttctttctttctttccctttctttctttctttctttctttctttctttctttctttctttctttctttctttcttttctttctttctttctttctttctttctttctttctttctttctttcttctttctttctttccttccttcctctttccttcctttcttcctttcttttccttccttctatccatccatccttccttctttctttctttcctttttctttctttcttagacagagtctttctcgtcacccagactagagtgcagtggtgcaatcctgctagtgttaaacttctggcctcatatgatcctcccatggcagcctcccaaagtattgggattataggcattagccaccacacctggcctggatttttgtgtgtgtgtgtgtgtgttttttttttagcagctatttccctctttcatgctatatatatatatatatatatatatatatatatatatatatatatatactatatggcatgaaattaggtatatatatacaattatatatataaatatatataattatatatatataactatataataaactatataataaattaggtatatatatatatttattttcttcattgtctcttcccactccttctaaatgtaagttctacaggcccaagatattttgctgttggtcactgcttactctccagcacctagaacagggcttgacacacagtagaggttcaatcagaatttattgaataaataaagtaagctataatgtttttgaaagtctactggctcctggtaaatgctccactgaaatcaacaggtttttcctactgtctttccttattattaggtaattgcatgaatgataaaaataaatgagaaggaaataatttcaacaaaggagtaagcaaatgaaaaaatgtacttcattccctgcccttcccccattaaaaataatacattgactctgggtttgctgtttttacaagaccaattggtttatcgatcaatattgcaattgaatgtaacccttaatttctatcagcctgtctcttctcactccctggtggcctggctgctgtgtgtttgtgtgtgtgtgagcacatgttcacagaaggaatccaagaggaagaaaagtccaacttcctataaatctgtgccccattttcctttctctcttttcttaattacaaggctgtttctggctcaatcatttaagccaaagaactttccgctttgagtcaggcacacggtccaaggaatggtttatagagcagcttggttgtcctccctattgtaaatctaaatttttgtctgggtaattgttttctgttgttctctgccatttttctcttgattaaaccctttggagaggcagcctgatgcagagagtgccctggcccaagagccaggaggtgcagcttctgatcttggtttcaccaccactctgccactcccttctcaggtcctctgtttgctcacctctttcttacccaagagggttggattagtcgcccttggagatcctgcccagctcgttcttaagaagcctgtttaaactccttcaataggtgatgctttttaaatatatatatatgcgtacatacatatatacaaatacatgtattaagctattccttaaactatgtttgcttttttatttcctatgaggaaagtctgcagtcaagttagatattttcatttttttaagtaagtcctaaaatgctattctagatgctgatacttctcgtttaaagaatgactctgcatactcacataagtaatttctccaatctgagatgactgtggtcatacagaaggaagtcaggatgaagaacacagaagaaagcaaactaaagggcctgtcacataaagggatcctagtctagtgacaaagagcctacatgttgtcacaaagatttggattcatttcccagtgcagtcccttattagcgatgtgacctttaacttcctcaagtctcagtttgctcatctacaaaatggtggaaatggggggccctcgatggatcttgtgatgattgagtggcatgatgcagatgaattgcttatgactgtgcttgggtactattatggcaatgaaagagaaaagcgagattcatttatcaatttctcatgaaatatgcatttaatatcccctgtgctgggccctaaagtaggcactagtgaaacagacacgaaagaaccaaagtcctttcctttgtgagtttaccaccctattttcgttatagcagttaggtgtcaagtaactatttttaatgcattcttttacccaaaaatttgttgtacttttgtatgctacctaccacaaagttaaaaatagctttctggagctaaggaaagatgagtaggttgaagatagaaataaatatgtaagttgacggaatttggctatctggcctgcatgcaaatctgaagcatcaattgtacctactaaaaaagaccgaaattttgctaatgagacaataaatgttttaaatggttgctgcttttggtccttctttatttactaggatgaaagcttaaagatttgcatagcagatatacaaagcaatgttcattgtttggttacattttgaggaagaacaggttaaatgttttgcttacatttgcattgctgctttcaaaataacttagtagagcattggggaaaatgccagcagtgcttacctcttcagttagcagatcctatttccggtctcttgtggcttggatgttgatgataacaagacaggcttgctgaaaggagtgcaaagtgcatggggaagggtgcatgtcctccatggcaggactttgacaatcctggtgtctgttgcttaacaccatgcttcagacctctaactgatctgatttcagctcttgccattttaggtatttcaaaaaataaggcacaaaatgaaagcttttaatatgtttgtgtttatttacatatatatgtgtgtgtgtgtgtatcctatcattatctatcacctttactctgccttatttttcttcacaaactatgacattttatattatgcataatcatttactttttctcctagctagcatttaagctccttgagggcaggggctttgattgttttctttattgccgtatccccatatctaaaacaatgactgttcatggagagcactctataaatacatgcggggaaaacaatgaatgaatgaataaatgaatgaatagtattgagtgcatatagcattatatccaaccaagcaggtggtagcagcatggacgtttcaacttttataagaaatgaatagtttaaaaattttataaattattttaaaagctcctaaaattaaagaaatgctagggtgatagaattttcagtactctaccactggtattaaatgttgttcccaacactgaaatcctgaagacaattttaagcttaagagtccaagtgtgtcaacataaagatagaatctagggtagaactaagttacccttcttaagaaagagaggaaggggaaaatatgggaactggggaggaaattattcacaaagagtgagctccagaaggaaaaataaatagggagagaggacaatatgcctggaggctggagagataaacataggacaagagatgcttctaatgttttcccaggaaatgctataaaccaactcctagcttcccctatgaaatgattagtaaattctgcattgctcattcaaacttttatgggattagagttttgttatgggagaggttaaaaggaaagaggtcactggacagctgatgtatattttacaaagaaataggtattcattttctccctgtctccactaaacaaatattgaggaaattcttacagactatcagcatgagatatgcagctgagccatatgttttgagtgtccctgttcttctgctgtcttgatttggaggttccaacatactagaagagatgaaaggggacaatgtagccgaatcccatggggatgatctcttagattgccatggactcttaagcttaaaattgccttcagggtgattttcagggtgatcacagaccttggattggcaacacctgttcaaattattttaacctggcaaatcaaagcctcatttatagaaataaaaatgacaataatttggtggcattttcttttataatgcacatgtggcctgctctacttagctagttcatcgagatttatgagaaaacatgtccgtattcttgttgcttaaaaacattattctgcatgttgcaagtagtcactgaactcaacttgtaaaaggctgatttccttccctgaatgtgccatctccccaagtcctcacttatagcctgctagggtttgaaatattgatgagtacaaatccattcatctccaaatttcagtggcctttcaatggagagtatttttagctttgttgagaatttggggcagaggaaatcactttcagaaatagcagattattcttttagttttgtagaactcgagatggaatctgtaaaatgaatctttgagtccttgctggccttatactaatacagtagtataagatcatttctgtgtaagtaactgagagagtaatttaagagcgtatcctttctgcagaatctaatcttaatacaaatagatgttaaaattccgataatcaactgtttaggtcctgtgtgaatactatcatatattattaaactatctctggcagcctgatgtggtgactcacacctgtaatcccagcaactatgggaagctgaggtaggtggatcacttgagcccagaagttcgagaccagcctgggcaatgtggtgaaaccccatctctacaaaaaaataaaaaaattagctgggtgtgatggtgtgtgcctgaagtcccagctgcctgggaggctgaggtgggaggatcacttgagcctaggagaatgaggctgcagtgagctgtgattgtgctgctgcactccagcctgggagacagagccagaccttgtctcataaataaataaataaatgtaaaaatgaaaaaagaatctctgtcatcttaatggatacagtaacggctgctacttagctttttgagttttgagatacattcacccgtacattggtgaagtccactcttgatcagacttgatggctagctcatcattggccattttctcagatttctaatcttccaaacccgttttctacgttccctaatttagagcacttgctcagctggttttgtccacctgcactgctgttaccctcatttcagcttgtcagatctcacccatattgttgacagtgaactcctgatttttcccctggaagtcatcctccttttttttctcaactctcacagcatttttaatctttttaatgtccttaaaaagcagcatcataatttagagttggagaggacttaatgaatgttctaatacaatctccacattttgtagctgtaagcacttgagggatgaggagattggcctgagctagtatcttatacatgggaaaaccagaaaaagaactgaggttttcttactacagccctgtgatcctttctctgtattatcagcccttcaccttctgcagcacattgcagttattcatccatatgtcttattgaagagactgtttagaggcttatttttaattaaaaagttaacatttttaaattaaagtttcaggtttagaaaatttccacttttaagtgaagcttgcaagtgttatactatttataaaattaacaaaccattacttttaaagcgactttgataaatatgatatttaaatagtatgatattaactgatatacacattcaattaatatactcaatttcatatttaagcacttcaattttctatttgactagccttcctaagtacttaaatcttataaatttaaaagctaagtatataaaaagtgaatctaaaaattctctttagctgtttcaatattacttacaaatttagtaacatttccacttaaaaatcccaagtttaagccattaaccaaattaaacatttaaaattataattataagcctgatagtctctcaatagaccatattctttcgatcataatataaaataacaaatattcaagtgccttgtcacaaaacgactagttctatgattttgctttatttatttcttcattcaataattatctaaaatatacctgtgtgccaggcaatactctaggctctagataaacattagcaaacaaaataaaaatttctattcttgtgaggctcaaattctaaggaaggggcaaatagtaagcaacataaattagtaaaaaacataggccaggtgtggtggctcatgcctgtaatcccaccactttgggaggctgaggtaggaggatcacaaggtcaggagttcaagaccaacctggccaatatggtgaaaccttgtctctactaaaaatacaaaacttagccaggcgtggtggcacatgcctgtggtcccagctactcaggaggctgaggcaggagaatcgcttcaacccgggaagtggaggttgtggtgagccaagatcacaccactgcactcccgcctgggcgacagagtgagactccatctaaaaacaaaacaaaacaaaacaaaacaaaacaaaacaaaatatatatatatatatatttgggtaaatgttaaagaaaaaatcaatgaaggcaggatgtgaaatgtgagggatgggtggaatggtggttgcagatgatgctacctttttctaggattaatactctgcacaaagaccttattaattaatttaggctacttcccaatagagaggtgttacattctgagtacacttgaggttgtacaaggactggagatttggcttgttatgttgactggattcccactggtgactctggtgaatactctgaacttattattgtttgtccacaactccctgacttccaaagggaaacttgtagccctacattatttgattggattttgtatgtctttggctcttaaaataatgtaaacagacttcccacccaagtggaactacctttgacacagccctgaagtccttcagattcttcagaccactcagtcttaacagacatatctggctgaattctgggcatccctcttggttttgtcctgaaatgtggacacaattttcccagtcactttcctgattaattttagctctccaagaggatggagaacttcaagaggacaaatactattatgtcttagctctgttttgtttctcatttattactgtgtcctgcagaacacaatgggtttacccaagtagtccctcaatacatgttgtttaaagcagaatagtgcagctcaatgacatagggtcatgtcccactcagcctcttgattgcaggcaactgctcaaaaactggacttcctcaagtgtgaaaaggaattataagaatccctatgtgtcccaaagcactgtctaaactaagaaccactctatgaatgctagttttccttactattaatggtttaatgcttattttaaaaatccctcaaagcatttcacaagcagatagtccctttccctttgtatttaggcttcaggataatatgagcggtaccactgttttatttttacaatactgatcattttatcatgcctgttgtatattcaggtgtaagttctttttcacaggatagcttcaatatgtcaggatgaactttcatttatttattttcattcaatagaactaactaaattctttttctgttcattcagttatcccactctaaataccagggttctctttatagatggaaatgtgaagaaggcagctcttacttaaagggagtttttttctgctctcatgcactataccattatttgggcattctaaggaaaattcaggagtggttttttaagagggctgtgttgctctggggagcatcatcttgacaatcttgttaagggagggtgtttgaaagccacttcaactagaaaacttactttctacctggagtctgagtgcacctgtatccatcactggacggaactctgatgctgtcctgacaatgccctttcatgaccttaacctgtggctctggtcatcactgttcctcagttctcactctatcacatgggtaactgttgtactcagaggctttgggagtcctcaaatgtctcactttccctctgtcattttaaaaactgctgcacagcccttgtttatttctatgtaattattacttcatcatatatgatgttataagccaatttgattcttttttggggagaaggtggaagcgaaggaagataggaaaagaaagtcaggctcgtactattacattttcacagatttatttgaaattgagtctttcccagaattatctaccacctcttatggtcagtttgacacagttaatgccaagcacagtttataactttttaaaattgatcaaaaattaccctaactttgaaggtcctgaaattactgacacatataagaatttgcaaattaaatgtggcacacagtttttaaatatacatttaccatacacacacacacatatattatatatacacacacacacacacacacacacactcacacacacacagagagggagagctatttagccttttcttgatagaggacgtaaaggagagtgttaattaccccattctggagaattcaacttacaatggaaaacatgaaggagagctgtttaacatctgcataaaacacttgtttcctggtccttctaatgatgcattcaggtatgaaaaatgttttctatttacttgttcagaattattttaaataaaggaagaaaatcacagcagcttcctgcttcggaggcccacagagttgcagccaaatgacttgctattatcataggtctttatgtttgctgaatgcttttcagtatatctgattgtattcacagccctttctggtggcatgaaggaggctggtgttgctcttgtgcagattacaaagctagaaccagaggaaggggaagaaatgatggcttaaggcattcttagaagttgggttcgagcctacagtttgtttttctctttaagatctggaaaggtgaagaatctgatggcagtgaacccagtaatgaatacgatgttaatattataatgttatttattttatttacttatatactatagtaattaatttgtagtaattaagtagtaaacctgataatatctgatctaaatgattagcataaagaactatgtcaagatcaaaattcaggatgactaagaggtcagaacataagatactcacgcagaaggatgtaggaataaccaagagaactgaatgacctctctaagagcaccaagaaacatttacgccaggatacacaaagaactaagacatttgaggggtttggcgatggtgtcaagaggtgctcgctgttttacattattatgtatatgctgtccattttctagagagcatagagatagaggaaacaaaactgagacttaatcaacatcatgggatttaaatatcaaactatgaacagataaagaatgcatgtgttttacacgagtactgaggaaagacctaaattgaagcatgtgttattttacgataatatttatttactcacaaacatttggtaaacatcttccttgtgctaggccatgcatagattctggggatacatagtgtttttctgatgaactagaatggatgctaaattgtatcagcacagataactctgaatatctaggacttgccagtttacattggcgtggtgcaagccatagatctttggacatattgtcttctcccagatcatcaaaggccaagattttccaggataactgggagcaagtcagtattagattctgcactgactccacgaaccaaggtgtttcagggatattaggataattttagggcaatggagtttgatttggaaagttggctttgcacagccactccccagatggccctggtctagatcaccccttcatgtcagtttttatggacaaggcttcccctcggatacctctggcattagggaggcacagatgtacttctctgcagctgtactttctagaaaccaggtaaggataatgaccaagagccacttgaaaggcaggtaggtatagatgatgagtaactgcctggggccttttaaaagctaatatttataaacatatattacttggctgggcatcatacaaaccaatttaaaccaattctgtgctttctctagggcagatgtgcaaacatcagaagcatgtagagcccagggaaagcatgcaaacactgatcaagtgcacagcgctgtgtgacttttgtcacttttcatgatgtataagcacagctgccttttttaggaatcgtgagctggagtcgtgagcaaagtgttgcaggagtagcatttttcaggagagtgaggtgctgatgagtgttaccctctctggtagtcaggagaggatcattgagggggtggtttttgagagttggtttaaggtagaaagggagggaacctgccatctggaagtgtgatgatgttccaggcattgggtacagcttcttaaagtggcctttgcttctggagtaaatgaaaaaaggggacatttagttaacttgactgagagaagctgagagagccaggctgttgagagcacttgattagctgtcagataccattctccctacagtttcttggcctcccagccctgaagaactgtcagtaaatattgccatacaggatcgattccatttaatcttttccaaaccacaactgtgcagtaggtgatggcatcatcatttcacagacgagtaaacagaggcccagggaacttaagcagcttgtgtgccaagtatttaaaaattactgtgtgtttacatatcacatatgaattcacacacacatagatggtggggattacgaatgcaaggaatgttattttttgagtcctttattccagtcacagtattataaactgtgaggacagccaaaagacaaattccccttttttgaggaatttccaatatgaccagtctttatacaataagtaggaatgaaaagaataaaagcaacattaaaaatgcatgaagaacactgaagcacccagaagatttcagtgtggccagcctgggacagggctatgcaggagaacttttgagcggtgagattggagccagtttttgtagttagaaatggagaccaggtgtggtggctcacacctataatcccagcattttgggaagccgaggtgggtggatcacttgaggtcaggagttcaagaccagcctagccaacatggcaaaaccctgtctctattaaaaatacaaaagatcagctggacatagtggtgtgtgcctgtaaacccagctacatgggaggctgaggcagaagaatggcctgaacccaggaggcggaggttgcagtgagctgagattgtgccacttcactccagcctgggtgacagagcgggactccatctcaaaaaagaaaaaagaaaagaaatgaaatgaaatgataggctatatgtattcagaagaagcacagatagatgaagagtgcccagtccgtgaagggccttgagtagaagcacatgatgtagttcatattctcttcatgactcaccaggttcttaagggaagtatttttaatgaaaacgatgaacaaaaagcatcacgattacatgagattagaactggaaaacataaaatctgtgaaggtgactaatataaaacaataagaaagagatcaacttttagcaaccttttttccgcaaagtccaattcctggcaacatggttgacactgaaatgttggataaacataaatggaataaatggattatgatagtgattgggaatgtatacgatatgagctaaaatatagattcttgatacagaagagacatattgaaagaaaaactttgtctaaaattaaaaatattaaattattattgtctcagtaaaatctggagattctatggggagatagggagagcatctatcaatcagggtccagttgcagaggatggaatccacccgtctattttaaacaagaaggaatttgttacagagccatggtaagtgggcctcagaaccattgcacagctgaagtagtagactctaaactgagctttcatgaacaactctcaaactcaaagctgctcccagaactggggccccacattgatgctaccatagcaacttattaagaagctattaggatcaggaaggcactgccatcaggacctgcctcggcaccaaggagtggatcctttcatcggctccataactgctcctgtctgcactagcaaaatggatgggatttttttgacaccacatagttaggggcagaaaactgggacctcagccacagaaaactgatgcctccaagactgtgcttgactgtaggaacagcagaagtggctgctctctcacaaatctcttaggaaggcatttcactgaccaagccaaagttaccttttggtctgtggctccaaagaggccagcttccagcactttgcagcaaaggcaggtatgtccacacagagagggagaagcaatgtagcagcaagtatctggaaggaagaaatagttggtattttgtttgcatatgataacaaacactggtttcatttgattcctagtattaggcattttgttttcagaacattttaatacaattatttgtgaagggaaggtaacaacttatagaattgaaaacaatgatggaacgtttacattaacaagagaaaaaaaggtaataagctgaaactctacctagccagcaaatagtagaggaaaagaggagaaaccaacaaagtaaactaaattgtaaatataaaataagaaaaaaaaatgaaaaaaaatcaagtgcaccattgctacattaaaatgtaaaaggactaaataccccatgtaaagaaagattaggaatgtgttggatcaaaataaaagcacacatgagttgcttacaaaaactatactttaagcaatatttcttaaaggttagggaagtgaaaagatgaacagaaatatacaagacaaagagcaaacaaaataaaaacactaagagcaatttgtattggaatgaaagcataaaatagtagaaagaggagcaatttgtaaagtcataaacttccatgtccaaataacacagcaactataaatgcatttttaaaaactgtcacaatgcaggaagaattgattaataatttggttttatagtggtatattttaatgagtagatagtagataacaggttaggacagagaggctttgatgatccaatttagaaactgacttagtaggtatatatcacagaattttatatagaatttcatgtcctttctctagctttctagtgccatgaaacatttagaaaaattagtcaagtacttggcctggagaatagcttgaaaaattcaaaagagcgtttacagaccacattctttaagtattgcccaataaaactagaaataagtattaaaatataaccaaaaattttaacaacttggaaattaagaaacacacttgggacaaagataaaatcagaatgaaattctgaactatctagaaaacaatgaaaaggagaacacttcaaaatctatgagacgaagagagactgccaataataaaagttgatacataagaaactagaaaaaaaatacaccaaaagaaaagataatttaaaaagatggaagcagagattaatgaaatggaaaatagcaacaactaaaatagtagaatggataaataaattcaaaagttaatttggggtaatatacaaaccccctctgaaacctttctctagagaaaagttagaaatgagaaaacaaacataaccaaaatattgaagaaattctagaagatagagaataccatgtataactttttggaaatttgatttttttttttttttttgagacagagtctcactctgtcgccccagctagagtgcagtggcatgatctcggctcactgcaacctctgcctcccaggttcaagcaattcttctgcctcagcctcctgagtagctgagattatagatgcgtgccaccacgcccggctaatttttgtatttttagtagagacggtgtttcaccatgtcgatcaggctggtctcgaactcctgatccacctgccccagcctcccaaagtgctgggcttacaagcatgagccaccgtggctggcctggaaactagatttttaaacctagagcagggatctgcaaactttctccgtaaagaccagagagtaaacgatttaggctttttggatcataccgcctctgtcacaaccactcaactctgtcattgtagcacaaaaggagacttagacattgtaatatcaaatgggtatgactgtgatccaacaaactttatttatgaaaataggccatgggtggatttggcctgcaggtcatagtttgtcaaaccctggaccagaggaacccagtatagcaaaatataaactaccaaaattgagctagggaaaatttaaaacttgaatagatgaattaatattatatttagtgtaatttcagttaaagtcccaacaaagatattttgaaattagattgtgctcttagagcatctattgaagaataaactgtgacacatgacaaagtgttatgataactataagcggaagaaattgccttatgtgctgttaatatgtaccataaagccatctttatcaaaacggtgtgacgttgacaccatagctaagcactatgtgacaccacatagttaggggcagaaaactgggacctcagccacagaaaagtcaaaatgtgacttttattgtatgccttataaagttaattttatatagattaaaatcttaaccaaaaactataacacaatgtaaatattcacagaaaaatgagatgatcaagtacaacgtagtaattggggtgactgtttcagccaagggattggaaatgcaaaggtacaaaagaaaaaaataggcattttatcctttatgaaaatgttaaatatttgcaagaaaaaatatatcatcaaatttaatagacaaacaataggtgggagaaaggattgcattgcatataccagttaatagattaatatcaatacaatatgaaaaaaatctaataatttgatagagcaatagaaaaataggcagataatttgaatgagtaatttacagagagcaaaaataactggccagccgtgtatgaaaagtcttaactatataaggaaatgcagatttaagtaacaatatggcattatgctatatcccttggacaggcaaaatattaaaagtatgataattccaattgctgacaaggatagagaaagagtagtttcatgtcttgctggtagaaatgtgaattactacactctttttggaaaataatcaggcaacagctaataaaatttaaattcttctcctggaactaaaattagcttaagtaatgatacgtgtacaaaaattatgcattgcagcactggttatagtagggtaggcagaccctctcttcagaaaaaaataaaataaaataaatatccatcaaaagagcaatgtttgaatacatgcggtatttgcttaccatgaaatattcagcagtcttttaaaagaatgaattttaactccaacatttggcacatacatttagtatgaatggtgaagattaacaagatggagaggagtttatagaatatgaaatcatttttgtcaaacagtggcaaagactctggtatgtgtatgtataattatatatactgtagtgtgtatgtataattatgttgtaaatgtgtatgtacacacatacacacacacattgccaaagaataaatgaaatcttgttttattttaaatccagaaagtgtcagatgcacttttatttgtaatccccccttaaagagaagatattagttaaactaccctctcaaacactgggaaactaaactgagatttttttttttttaatgatgtcgaggaacacagcattagctggggtatggtggagagtgggagagcatttacatttaagaataattaatagagatcttgttttagacgtttctattgagaagaggtcctggttttatggcatcacctattgaatgggagtatcccatagttagccaagcatatattaattagtacattccgccaaagccttcagcttcttaggttttggaaccagttaccatatttggaaaaaaccagtgactcaaatggaaactttacagtgcttctctcctctgttaagatatccacgtcatcagcttgttatccaagtggaaaggcacatttttatccttcagtggatctgtcttcttcacctagtaagagctgattcttcctcccacagctgtgttcttagtgtagctaaaagtgggtgcacccatcctgtttactcctacccttaccttcttgaaaagagggaatagattggtagtatgtgaacatttagatacaatgtgaaacaataaaattaaatatccttcttagaagtggttttcagacttctcaaaaactgacacagggtaacaaatacattttatatcacattgagttgtgttggtgtgtgcatgcctgtgtgtgtgtgcatataaaataatgaacaaaattttatgaaatgttacttgttcttattatatgcattccaaacaattcctactctcttctagtctactttattttatctcatttaaaaaatactgatcacagcacactgagttggcttagtaacccactaaatggggtagtgacctgcagtttgaaaacatactgcatcaaaggactcctatcaaagtggcatgcatggcattccatggtcagaagattttcactggactggagagacagttgctcagtgaggtcaaatacagacctaggcatgttttactttatttcacatatgccaataaggtcagcttatgtgaaagaccttctgacagcaggttccttaaggtagttttaagtttaccttgggccaaagccttgcaatacttttagagaattagcttaagctagaggcaaataaattttaactgctgtggtagatgccttagctaacgatttttctcctacagttgggactgtcatgagaagactggtcatcttggtataaatagaaggcatctcagttgatttcaactctgccctaagctttcttggattcctctcccatttaggctttaaaagaataagctaaagttggaaaaagaatttccatatgaaactaagcaacacttaagtatattcttttataataataaccccagttgggcatattgactacttaattcttcataatcagtagagatcagttgtacactattctaaatacaggatttgtgtgggtcataagaacagaggtgacttatgtacaggcatttaaagtggaagtgtttgaaaatctggctcatactttgactacaaagtaaaatgatgtgtgttatatctaactggatttgggagcaaagaatttcaaaaagccagtggaaactggactctgcctgtggcctcttttacaatatacctaatttaagatgtgtataagacacatttttagatattcactaggaaaacaaaggcttttctatcctgtcatttacttaatttttttaacctaacttatttttctgaatgattaacattgatgcctttgattgtgtgggtgttgtcaaaagagagttcatcacatggggaaaggttggcaacctctctctgcttggtacttttccatgagcctcctttcactattctcattgttatttccttttcactctgaagtagttccaaatctgatactgaaggaactcgattttattttacatgaatatttgaagtaaattgagccacttgtgttttaaggtttgtttagtatgcactacacagagaagaatataaagtaaaagcaatagcaataataacttaggtttgacaaaacacataacaaaaaagggtactttgagacacagaaagtcaaattataggtaaccctaaaactcacctttccactttcctttctttactagaattctctaccaacattggggtgtcggtggtggttaggacagaaggaagtatagatatagctatctgcttctaagacatttgccatgtctttctatggctgaagacaacttcaaagtaactaaaagtgccactggaaatagtttctgtgaactatattgatcataatttgaagaatttctaccagctgtgactttgtgaatggcaggaattcttagtttgtaggactgtcaaaatatgaccccaattttgtgaccagacccaaatgaagccgaccgttgtccctggtggtccattttctgttaggttctaggtcatttttttctgaaaacagtactgaagttggtagcttgtgggagtcactgcaacaaccaaactgataacgggaacccatgagactcagagccatgaagactgtcccagcacgctttacagcagcagtccctaaccttttgggtaccagggactggtttcctggaagacagtttttccacagacgaaggttgggggatggttttgggatgactcaaaaacattacatttactgagcactttatttctattattattatattgtaatatataatgaaataattatgccacttaccctaatgtagtcagtgggagtcctgagcttgtttttctgcatctagatggtctcatctgagggtgatggaagacagtgacaccatcaggcattagattttcatagggagtgaacaacctagatccctcaatgtgcagtttacaatagggttcgcactcctttgagaatcaaatgctgccactgatcccacaggtggcagagctcaggctgtaatgcaagcaatggggagccactgtaaatacagatgaagccttgctggcttgcctgccactcacctcctgctgtgcggccttgttcctaaccgcctgtatgtagcccaggggttggggacccctgctttagagtatgttgtactgaatatatcattctctgttgctacatcaaggtaacaatggcaccatctactcttgttgtcttgactctacatattaactatagtgatttgtatatcgtgtaacattatgtggaatcttaatatgattttaaattcacttgtcctcacaactacagttaacatttctctcttacatggaatcattccttgctgatcttgggttttcttttcttgctgtggagttgcgttgttgtttattttgttccagccacgctttctttattctcagtaatactcttagcccaatttcctgctgaatgattttgcagaagaacaaattgtcctttggcatttgcacctgtatgtcgctcattgtccacttgcttgatgtgtttctgtgaaagggggcagcttttccttttctaaatgaagaagggagagtccaaacgtttttttccagctcccatcaaaatatggacttaattccttttctttgattttgaaaggaaatggtgaagggataatgatgtgtttaaaattgggtgaattgtgttctttcttctaactgaaacagtgcagaggaacctacccattgtgaaatgttacttgtgcagcattgtagatgtgcaagaacggcagtgttttctacttggctggctatcctggcatatagttcatcaaaatagagaaacagggtgcagacattctgagtgtaagaccaaatgaactctaagcatgtttacctccctatcatctgaggagagagagagctgggagtgaaggaagaagtgaacaactgtggaatgtctccctatcctcagtggccttcagatacctctgttttttctccccctcccttctgttcattgggcactgacataccttgtcattacaagctattattattttttaacaaggtaagttcaagaagaaatgaaaaagagccagtattcatactgtgtaatagcatatggactttgctattctaaagcagaatctaagtagaatcaaaagatttgaacaaaattatgaatgaaggaccctgacatatctactaaatagtcaccagctttcacgatagcttctgtagcatgccaggggggaagaaagccacgttctttcctcactgttcccttagggcctttgttgtaggagaatagtgggaggggctgaggttggctttgactacaagtggaaatttttgttttcctgatgagcctggcactcaggacactagacatttaactgtaggtttatgattgtcacccactctgcttttaatgccaagagtttcagaacccggctgacctgagcagaataaagttctttgggttcaatctgcagcaatcagaattttgagaacaacaacaaaaaaaatcttttttttttttttatctggtgttgcctcagcaggatccccgaatgtacttgctggtagcttagagcatagtctatgcaggggaggagaaacagagttgcagctgtgatgtgactcattcatactatgttcttttaatggagaaaaacctgcagtgacatcatctggccaccaggggttgtgctgttgccagagagcccttgattttatctgcccgcaagtcctgaggcaggaagtagcaccttaacagagagccccatcttcattcctaagaaaaccagcatcagttttttgttccctttgttgactttccaactagggctgagcccgcttttctgaattaataagaaccaagaaagaaaagggaacattagtcgtggttccaaataccaaccaagcactttgctgcatacggtcggctttggtggcgggcctgagtctgcacccagatggacccatatggactcacctctctcacatctgcacctgacttgcacatataccttgttgataaagcccagtgacagctggatctatcacaaatgtcccacctgatttcttggaagctttgattagcatccatgtcctccatggcaaacatttaattataagggctggttgttgataataatcattgctaacatctatttattatccttatgtgttaagcattgtgcccaacagcttatacaatttagtctcatttaatcctccaagtagctatttgagatagttactattatctttcttttgcagatgaggaaagtgaagcatagagaagctaactgtgatgactgggatcactctgctgataattgtgttgctaggactagattcaggcccctctaactctgaaagccaaccacttaaatgatacttgattttcaagttggggggatggaggctgtggctaagacctgtccctggtggggtatagcagaaggacttcggggcttttttgttcaaactgcttatgtttatgttctcctttcctttccctcatcctttccttctccctcttctgatatgctttctgggtagggtggggtgaggtgtgtccgttgctgtcacactgagtcactgttcctcatgggtgtgccatagccttcaggagtattgggatgggaaaatagctgagaaccagtagactcaagaatggttgcaaaagtcccaagcagcttttctgtgaattattgcctttggtgctctctctgtgatggcagaacttcacaggccaccacactgctgtgggtgctgaggaagggcagaaaatagccatatatatggaaaacatatgcctgttacaaatatgaaaatatatacatgaaaagatacctatgcaacacacatacagatgaaaaatatatgcatatattttaaaaatatatgaaaaacaaatatattaattcatgtgtgtatatatgtcctcctctcccaattccagcatcagtgttggtaagagtgcaagctgttatacattcattatgcaactggttttcactgagcaactgctaggagccttgcagagtgagctggggctttggtggtcatgaagccctggcccggggcttcaaggagctcacaacccagtgggtttttgcttttcttgaggctaacactgatggttcaatttatagatcaagtctcttcaatcataatgattcagataaatagagaattttgtggaaaagtcttctgaatagttttttttttttttttttttctaaaaaaacaaaaggctgataaaaggacaaggccccatgctttttagtttctaatagtagtggactggaactacttgtggattttgagtttttgtttttgttttacttaattataggattagttttaggtgtgactttttccatttcctttggaagcgtctagtttgcaataaattagaaatgccagctgacagcaggctaagatccagaagaaccattaactcaccattaactctacagtctcagcattactgagctttctgtttaaaggttaaggccgtttataactcaacaacccctcaggtcattcatgaaatacatcgcagcaccaagaaagtagtgttttcttccttaaacacatctcttatcccatcattcttctgctcaaaaatctgtgcttctctactgcttccagactccttaccatggaattcaacgtcctctatgatctggaccaaatgtcctttttggcgtatttcatactatccttaggttcccctggaaccctgaccccaggcaatcaagcagctcttggttctttcaatgtacctgatactttgccaatgatcttccatataagatgccctctctacctctgtctaaatcttattttaatatatgtgctgccgaaacgagaatgaaatcttcctactttgtaagaccaaactcagacaatattacctctatgaagatctttggtgtcagctattggaattaaatattccttatttgtgttaatagcacgtagtttaaaccttggttaaagcatttaatgttttcttttcttatttatagttagttggtgtcaacctaaaataatcaaaagggtcagaatctgacttagagagagtttattcaagggcaaagtttgaggatagcccacctataaacaccagctccaaaggaatggagtcagtgttctgaagtagggaagttaaagtttcatttatatatagtcagagaccagggagtttttagcaggattacaacatttttctgacaaagttggcacacaattgcagcaatttgattggttgtataggctgtgtttctttttgggaaggatacatataacatttgttacagagggtatagtggttatgggttttctgtcaactggcctaagcaaagcaggacaagaaaggggaagttaatctgtaacaagggtcattaagatggcagcaggtttttgtccctgttgttgtttgagtctctctagtcactgtacagaacaagaacaataagaaacaagttgttctataatctgagaaacagaagtcacaaccctgtgtggctcagatcacaatcacatctctctcaaggcttaaagtgtcttcagggttccaacaggttttaaatcatatttattttcacactgggtacattgtggaccgctaagtcctttgagagtaagaagcatgtcttctgcattttgtgtcacccatccatgagagaaaggttttatataaaatgagtaaatttttgagtggtataagattaagtaaattttagatctatggaaaaggcacttacgtgaaattctctgatgatactgaacaaattgcattgttgtcttggtccagtcaacaggcatctttttgatcctttgaggtaccaagcaggttttacccttagggcatctgacctagctgttacctctccctggaaatctcttttattctggaatgtcacatagcaactccttcttaaggccaagtgcactgacccatcttagagaggctttctgcaacttctcagaccattgttggttttgcatggtgacaaagcctgtctccagtcactccatcacagtgccctgttcgcgctatcacagccaggccagttgttgcccacttgctcatcatatgcatctcttaagcttcaggagagcagaggccctgtctgctctgataatcattgtatctccaggacctagaatagtgctgagctcacagtaatgccccttacatcatactatattatttaaaatcagtgggttttgacattggctgcccatcagtgtcaccagtggggattaacaaaacacagatgtgcaaggttaacctcaaagattctaattcagtaggacttgagtgatgcccttaaatttggctctaaatgtattaatcatcaaagactcaggaaaacaaggaaagataagctttctgtagcttccaaagttgtagctgtttttaaaattgtttatattttcttttaaactctcatcccatatccttaagccttgtgactgccacagagagaaaataagatcaagcatgagcttacattagccacagaaacacctggggcagttccaaagttttaattactgcttcattaatgtaaaagcttaactatagttgtaatgtataaacaacttttggcatgtgccctgcaaatgcaaaaaagtctaaataattattgtcgtggctcctgtctcaacgcaagaccaatgatcgccaaattatttttaagacatggactacattaaaaagttattgaattatgttttctgttagcttatataaagcacatgacatttaataacttgcaaagaaatgcttattttatctgtaatatatactttggtgtttatcagattctgttcaaactgtgtagcaaatttccttgaaaatagaactttcttttttcctcacatccctgtatttgatatcagactattcttagactctccacctcactcatcaccatggtgtctacggacttataagtatgacatgctgtcacccttatttatacatgaggtatggaggtgagcgtgaataagaatcttgctcagagccaattagttgcagatccagcattggaattcctctcccatagtatcaaaagtgtagtcatattcctagatcattaggcaggaagaaaaagaaaataaaagaaaaactactcagagacatctggccggatctgtgcctttcatcagaataatcatgtcctgaatctcccactggggttgtcagaaaagatttttcccaagcttttctataccacggagagctacatttaatttataacctgaaagtatcccctaaaacagactcataatcatgcttgctgaaattttagcccagccttcttgcttgctgagaaaagagctggctgtcctttctctttgaataagcctccttgtatgaacagtctctagagatgtcccttttccagatgaaaatctgttttatgtgttatcatgttgaccttccaatcccttgaatgattttacgttttcatcttggtaggtctgttctctctataatctaatttaatagttctaatctgcacatatccaccacatatctagttcaatatcaagcaggtatccagtgagttcacaaactcagaagggcaagaaatataacttttcttatttttcggcaactcattttcacttctattttgagttctttttctaccaggagaattttagggaaatgtttgcccccagatcaagagacactctcctctttctgcttgctaggcccaaaagaacagactcttttgaaaagtgcagagtttagaactctaagaggaagaacagtcagaaggatttttttttaagcaaagtctatttttcacccaaggtggaatataatataaagtactaatcagttatacaaacatgttatttataaaataacagcccactaagcgtcagaggtgaggggttgccccatccaattttcagagtctaaaagaggcatctgggtgtccattacctgaaacagcacaggcgctagtgtctccagagaaaaggaaatggaagagggaggcaggggatgttacaacagggtgtgattaatagcagctcactgctggagttcactcaggaaaggctgggtaaatgctgcagctcaaggtcagtgtgaggcaggccaagggatcggttagccctggaacttctgagtgagtccttggctccagttaaataagaagcagccaagatctgggaaggtcaacacagtcaaagccctaccaggaactaggattataccctgggcttcaagccaagaccagggcactctggctgatctgagtgtgatcttgaactctgctttgccctctgagagaaggagccgaagctctgtctaccttcagggacagaggtctggagttagtttcctgattacagcaggaacaacccaagaggccatcagatactgggaggttcttacagtgctctaaaccctttcaggcaatttgagtcttctgtgtctattgtcttcacaggcatcttgtatagtgttggaaacctatagtgataagtgattttcagctacttactagagatgggagaatttcaaagtcctttccttcattgtccatctttactcatttgggtagagttatacccagttctatccctgcatacatacttgcatgcatggggtaagagagatctatttacaaacacgtgaccacaaacacatgaccagcttccaaagctgagaatgccaaggacacatggaagttattggtcacctgagtatagaaaaagcagggaaacccagctcaaccactttctgtctatgaacgtcaattttcctctttataaattagggatgtgtataaaataatgtgcataaaatctttggcacagtgcctaacacattgtgaacacaagtgtcagccaaaattatgagcatgcagctgtctctgtgtctgttgagcagagcttcctcaatgtgttgtcaatggctcaattttggaaacgggcaatgtctcgagacagtgctgattgccacaacttacgggatgagtactactcgtatctagttggcagaggccagatatactgctgagcatcctgcagtgaacacacagttccctacaatcacaacaatgagttcccctacctgaaattccatagtgctgaggctgagaaatccggcgaaatggtcatagcaagatgagatgagtttagctgatttccttcatccttaggaataagaacatgttaacatattaacattattgacctctaccagcacttaaaggacaaaaagcctatcaaatctaaaccttgctatgaaacaaaatctgattcttgtgagagaaaagtcttccttgattctcaagagaaagtaaaaggtttttgtggttttgacttaaataattctaatgactcgatttgtttattggacaatagattgaaggagctaagctggattttgttgattttaatttttaccagtaatgtagtataaaaaatgttttgctagacttgtatgatttactaaataattattgatatttgcatatcatgtaggatcaagaaaaagtcacatgttaaattctgtgtacagagataattattttcagtcaaatgaaagtaaaagaggccaggcgcagtggctcacgcctgtaatcccaacactttgggaggctgcggcgggcagaatcacctgaggtcaggagttcaagaccagcctgaccaacatggtaaaacctcatctctactaaaaatacaaaattagccaggcgtggtgctacatgcctgtaatcccagctacttgggaggctgaggctggagaatcacttgaacctgggaggcggaggttgcagtgagccaagattgcaccattgcactccagcctgggcaacaaaagcaaaaccccatctcaaaaaaaatcaaaataaaagtaaaggagatattaagtttagcttgcctgcaatatacaaattaaatgtgctagaattgagcacttatagcacaaattataggaaataagatagtgaaaaattaaaaattacttaggtcataaaaatgcagaaaatacataaagatgctttggagccatagagcacctgttaaagcttgactttcattgtatttccatgttgttccattacattaggggaagcctccttagtggctcatcacctcattgcctagactgggtaagcagggacacagggtcattgctacctttcacaggtgctttactgtgctaaacttctgaaaagccaccttttaaaaagggaacatgcattttcaaagccactgattattaaacccctctttcagtcatcttatttgcagactttcatttttgagctttgtttgccatctgggaaggattttgaaagagaacataggcctcttcctgcttttatgttcagcatgccatgaattgcattaatgaattcttaagatcgtttgatctatttaaaaaaatagctctagattcagtcagttgttaaaaaaatgtgttcaagattgtctataattgcactagccacaaacagattttcgtaggtattttctttgtaaagaatctatttgaaatattggaaatgttttcaggaactagagacaaaagatatacatggttttttgaataatttagcatgtcctaatttttaaatgtccctcagtagtcatttatctgcagagcaagtaaatacaaattttaaaaaaattaacagttatatacgtgcttattgtaaacagtcaagtaatacagaggaatataaaacagagtgaatcatcttctccctgtccaacctcacccttttgcagcagccaacattaacaatttggtacatatcctttctcaactttctcaatgctcatacaaatgcatggatgttcatgttcacataaaaatggtgttttattcctcccccaaatggtgcagatgcaaatatgatgcagtaacttgatttttgcattcaacaatatacaatgaaaattcctcctagtcaatacatgtcaatccaattcattattttgtcaacctaaggtagtcataagggtcagaatccaatttaaggagaggttatttaagtgcatattgtgagggtggccaactcaaacatgccaactccaaaggaatggagtcagcgttctaaagtagggaaattaaggtttcatttatgtagtcagggacagggaagtttttagcatatttcatttttcagacagggttggcacattgttacagcaatttgattggtttataggcagcgtttctttttggaaaagttacatttaacattcattacagagggcatagtagtcatgggttttctgtcatgtggtcttagcaaagcaaggtaccaaagaggaagtcaatctatagcaagggtcattaagaaggcaggagatttttgtcctggacatttaattatctctagccattgtagagaacgagaaaaataagaaagtgagttaatgtataatctgagaaacagaaattataaccatatgtgactcagatcacagtcacatctttctcaagacttaaagtgctttgggggtcgcaacaacttttgcattatatttattttcacaaattttaataactgaaaaatagtatacagtgtgggtatattatacttgaatactggtgccctactgatggacgtttaggtttttgtagttttctaccactaccaacaatgatttatactctctccttaggtttgcacctttttttctgtaagattgattctcaaaagtgggatggcagtgtcaaaggctctcccaatcaggtgtcacagtgcaaaagccaacaatgtgtggttaaaggatccattttttcacaatcttgccaacacaggctcttatcccattttggcttctttgcaaatatcttagatgaaaaacagtatctctgtgattctaatttgtgctttccctattgctagtgaggataagtgtcttttcatatttcatctcaccattgcattttcttgtctgtgacttgagtgaaacttttctaattcttgcatattttattcttgctcaacatgtcacgactcagaaacacatatttccatctcctttagcatttattttgctactcagatttcagaaggaaaaaggatttttttcctgggcattgtcagtagtagctatttggaatgctaaagatttgataagagacattgaagaaatgtgaatgttactgaaccgatttgcttaaagtaaagggaagactgtctatacgtctgaccaatgctttttgaatgttcaggcccctgaatctggctgcagtcccagtaggcatgggtccaggcgtgatgtgtttgtggttgcatcatggcatcgctgtctaaccctcgcctttgcattgaagttgtgcaaagattagagaactgtaaaaatctcaggcctgtctgaggaagtctttcttactatctatccctttctttaaacatgccttgaaaaaaaaagctacattttgtcctgctttgtgttcatagtgaatatctttcattgtcaagaaaattttttcctgaactagctctgaaagatgactcagcactttataagatcagtgagcctttaaggaatgacctaagatggaatgtatcctgtccagtgaagctcaaggcatgcacaggtcgtgttcacctcactccctcaggagttgaaggagataagaaactggtcccacagccctcaactctagcttgggtgcctcgcagctactcagctaaccaaagaaatgagtggaaaatcagttctctggtctatttttgatggtgtgagaagaaggaggatgaggaggagaaggagaagaagaagagattacttctcattttaattgaaatgagtgactttttattaatgagcttgaattcagaataatttattaccctggagttttcttataatataataagtgagactgttttcctttttgcttagggcaaaaaatgtaaggaggctgagtgttacatttggaggtttatcttttttttttttttttttttttgagacggagccttgctcttgtcacccaggctggagtgcagtggcccaatctcagctcactgcaaactctgcctccccggttcaagcaattctcctgcctcagcttcctgagtagctgggattacaggcacccaccaccacacctggctaatttttgtacttttagtagagatggggtttcaccatgttggccaggctggtttcaaactcctgacctcaggtgatccacccaccttggcttctcagtggaggtttatcttgtcaggtttggcttccttttcccagttccatgaaatgtgaatttgaatatgtgtttgtgtggtcagggagagtgttgggaaatgagggtgggatacagagagaaggatgatttaaaggtttagatggtctggttatttttagtttttctattcccatttctgcaatagtttttatttttcctcatacactatgggagtttgttcacagaaggaagttcctggagcctatccatcaggaacattaactatatttttgtttgtttttttgcataactatttgtttagtttttccttcccaaatttgtggctgctgtgttcttgtgactttttgtcgggggtgtttttttcttgcttgcagtgttacccacaatgcatctattttgtgtgtattaaacagtccctttcaagagtacaaataatggtttgaaataggaagagtatcccaaatgctttaatcttatatttgaaatgtaggaaattggaggagctgaggatatttgtgacacatattttacatcttctcattgaaagtagagctgttgtttgtctgcatggttttgagtttggtcactgaaatgctaatgacacagcagaaacccttggtgtgtgcataaggccacatgacctcaggtcaggaataaaagcttagggctgagcagctcactctttggttgagaatccagttggctcccctggagtgaagttctacacagaccctggaggaaccaccccatctgtaaggaacctaagtttctgtatttctggctttcattgtagaaaacctgatgtcttctatacttgttcccttgacctacttctaaaacagtttataaacaatttcaataatattcacagtcaagtagagctgtcttttactgatatattctaaacaacataaattaaggtggagcttagaacatataacacaactatgtcctaatgacatgaggagacacctttctcctgcaaatagtcccagatatacatcagttttcaacttgtcaggatggcggataagattctgctgtaggtgtctttaattaccaagtggaactaacattctagtgttacctgcaatgtaatgaagagcctgattcatcttgatctttttcactgtacttacttatcgttttcctgagaaagtgtggctttagcatttgttttacctgagcatataaaggtataaactcaagcagaacattgatagaatgaaagctagaccctggcttaatgtagtccttgaaggaacaagatgcattaacaaaaatggagtgatggttctagtagagctggtatactgatgcgtgctgattgttacttctctagcacatgttatttgctacccttgttaatggtcattgcattggttgcaagtcttggttattttatattcaacactttaagaagaaatgtgcttccctggctagttatcagattttttatttttatttttttttcgacggagtctcactctgtcgcccaggctggagtgcagtggggcgatctcggctcactgcaagctccgcctcctgggttcacgccattctcctgcctcagcctccctagtagctgggactacaggcgcccgccgtcacgcccgggtaactttttgtatttttaatagagacggggtttcaccgtgttagccaggatggtctcgatctcctgacctcgtgatccgcccacctcggcctcccaaagtgctggaattacaggcgtgagccactgcgccaggcctatcagatttaatttataggcatttgaatagtacaaatgtaagggcatgatagctaattaaattattccccaaatatttattgaacacctagtgtgaacaaggaagcagtgatacgaagaatggggcatctaacaatctagaggaagaaaaagacaatgaattgtggaattaaaatacagcatagtaagtgcttcaatattaagtcacctaactctttattctccacaatgtttagcaaataatcttttgctgttcatttggtttttcaagtagattttgttctgaggaaggaaagagagcacagaatttaccttaaggtatttggtctactagtcaaaccagtctcccagcagatttgttagtagaaattatctcccaagaggctaatcaccattgtgtaaactgatggaatacaatttctggacctaagaaaacacaggtgaagccttggaatatgatatgtctcaaatatgcagcaaacttggtgaccccgacctgaaaggccggctgatcttatgtggtaatgaaagctgggtcttaatgcagggacattttctgtagttagcccagtgaaatgatgtcccaagccagccactcccacgcttctgagcagtgtcaccttagatggtccttcccatcactccaaatttccacagcttccagtgccttcaagagcatactgtataggcacaagctagggatgggaccagggaggccttgggtaaaagcagccagttcaggctctctgagattcttgtctctggaggtgaataggagtccttgcttaggtcttggccacagagataataatttaggcttatgtatattcctgaaacctttaattggtttgagctcctggaagattctccaccctttaggaccatgtggtacttggttaactgttgggtaccatatactttctgctatctttagtattacattgaattttggtgacttaataatacatggttaacctgagattattgtatcaatggtatatttttcctggcagtcagaagatggccaccttgtacatatggaagaatgagaaagggaaggaaagagttccatgtatttgttgacctctatatgtaatagcacgtcacttccatttttagcccaagttaggttttggacagccacaaatgtttcttttgagactagagtccattttaatcagcatctaactatttggattgtcacctaagcagcatatttaacaacaacaaaaaaggaatagatgtttaatgtggtcggctacaacttcagaagcatcttctaagctctttctatagtcaactgattagtacattctcaggctgagcattgcagacataatttctttttttagccacattattaatgaaaccaaagctttagaaaacagtactattaatagtggtgactcatgtgttctttatattttcagaaggacaataaatgtttagaggacgatgtctgaaatattttcttcataaagtgtttaaccataactatagtaataggtaatattatgtgtcttagtgcaatttataatgcaatttgtaatgtcatttatactgtatatagtatatagtggtaaggtatctagtaatgtatataatattttgtatatatataatgagatgaaaaaatattttagatcaaatgaaggcacagaacatgatactcattattctagtgctgttggcaatttggtaggattcttacaagagaaacagaggaaaaagaggttttctagagtgacagatggcactaaaagctaggactgaatagaacatgactgaggaatgctgtgtgtgacagcctacatggcttagaggctttggtagggacatcacaggcagtctaggtggaatcaccacttacagccagctatggaggactttgaatgattatataagaattttcaaatctacgccagaagcaatggagaatccatccattgaatgttttttgaacagggttttggcatgttgaaagcaatgtgttcaaaatattcagtgttgtgtagattgggtggtggagaaagagaatacaagcaggaagatgaaatttggctaagacttcagtagtgtgagtatgtagtgatgaaacccctaaatcactgtcatatagcgatgaaaattaaagggttatttatttttcctcatgcagtctggtagtttgctcagtgaaggaagttcctggagtcaatgcatcaagaacattaactattttttgctattgacaaacaaacatcacagatattatgaaaagagcatcaagaagacttgattgtttttgtcttaggggattaattcaacaaacattggttgatcaagtcctatcagaaagagtttgggagacataagccaccctggacctttcctagtggtcgatgtggggaaactgcagctattaaagctcaggcttaggcattcagtaagcccagatggagtcttgagtgggattgggagatttcagttcctgtcaaatttctgcatgaggtgttgtggtaaagtcaaaatagcatgaattctgtaacctaacagatttgcattaaaatctcaagttcaccactcatcagttatgtgagtttgggcaatttatttaactttctgaaccatcatttcctttttggaaaatgaggaaatgccacctatggaagacgattctccatagatctcttctgtttctacacattttgtaagcagagacactgatggtcttttttctggactatccattcaaatttcttaatagtgaaaaacgttggaagacagagacagtgtctctttctagagcagaagtcagttttgcttcttcctccagagcaaaggtttgcttactgcctattagaaaagattcagattccctgagctcaagtttcttcagctgagatgcaaacccattgcttgtgcagtatccacctaggtccctccatttcaccctccatgggacttggtagcaaggggaacccactggaacacaatgttcatgctatttgctgtgccatgagtctctgatctaggagtctggaatctgccagaatccatggcactgttgtggactaacttgttagcttgcaagctgagcaaaatctcagaccctttatagtgcttgatgccacctgcctaatgtgtttctagggaggacgaggcaagataagatatgtaacacacctggagcatagcatgcagttaaaaagaaacacacacatttattccacttcttcccttaagagaagtaactgagcagctgcttcgagaaagttcctgcagtggtagcagcagttatccctttttcaatatagtttcagagtcagggcagttcctttgtctgagtttcaggatacatttgggcatgactcatagagaagaactcaacaaagtttaagaacagtagattattatactgcttggttgcaattgaagttcttgagtccctcattaacttctctcaaggccaagatatcattagagagcaacaaagagtagcctgatagcaattctttatccatgttactaggattcagctggggataaggaggaataaacacagtcatctaagatagtttcctaggacagaggaaaaaggattagggcctggggaagaggagtaaaactgctatctgtcagaggacatcaatctgaaagagaaggtgcaagcaactcttcctataagaaggatggatagttcccagaagggattggtggaggagggagcatcacccttgcagtctcgtgacatttgttatcaactaatgccttttttttttggcacactttagtatgacagtcaggtggctgatcctgggttactgtttttagagacattttcttattggtggctccaggcacagtaagtacgtttgcctttagctgtggtctgcccttacaccctcatgctaggacatgtggaggtttcaaggtgaacaaaactgattttctatcattcagttgctaacattgtagtaagggaggtaagacacgtaatcaaatagacataacccgggagaaaaagtagcaaatgcctgagagtgggccaggtgctgagagagtgctgtgtggtgacagcactcccagggagagtctgggtcctgagccctcacaccagtgaagagaacctttcaatccctagggcaggaataagccagcaggcccaaggtgtagctcaaagctgtagaagcctgtgctgagctgttgaggcaagcaatgctgagcactgtcttcagagtctcaaaatcttatctctaccatgtgcctctgacacagctttatttatttcccatacacagccttgatctctgatactggccgcccaacttgttttagatccttgacttcaggcttaatccctagtgactactatcatcaacttggagacatataacccttggctgccatctatggccacatgacccaaatgaaaccataggttccagcgtggcctatgctctcaggaggccctagccatgaagggccaggcacattgaacccagcctcaaacattggagtagagaacgcccatctggcatttctcagggcagaggaagacgaacatagcttaaagacaagcccacagtcatgaggtctatgccaagcttcaggagactccgggaaaccagtcctgtaccctcacctccaggaaattcctgattggtctctccagggatattcactatagtcccagaagggtctctggctcttgtggttgagccagcatccctgaacttctctctatgcatgtagagaatgtttccaggtaaactattgaaaggccacatcttaattaccagacctatcttcagaatccaaatagagaccacagaccaacaactggtagctacagttccatctgtctcagagagtccaaatgccttaacaatgccgctgtgttgaggtgtgctgggggcactgtgtggcctgttcactagtgccccacacctggctctcttcagagtgaagggggctgggctcagggaaagcaaagaaggaaattgtcatattgttcaggtatggtttagactcctagaccatttattgcagacaagatcttaaaaactgtacagaagacaaagtgacctctgcaggcttagaggaagccagattggggcaacaaataatttattgaatttttaattaatttaatttggggtcatggcaagtcattgaagacatagagatgaaacttgatagagagttcataatgatctctcttttgcctgaattctatgatattattagtctctgtttaactcagagctcttctttgaaaaaaagaacatgacattcagactagtgccaatgaaaaatgaggcttatttttaggataaagagaaagcttatggacgttcaggagaagtcaaataatcaggcctcaggccaggccgaattataaattccaatgagctcagagacctgtatagcacttactagattcttaataagtgttcgttaaaagaatgaatgaatgaatgaatgaacaaatgaactcacaaatgacctaagggagctcagaggaatactgaggactacactactgtcctaccaataactgacttaatcttactgcacttaactctcctgtgtctcttggcccaaaatcccaacagaggaatccagagaatacccctgggtcagatgcccatctcagtccattaagcaatagccagagaaggtaatgccaaatgaccatagggctcccttctaaggatcagacagattaagccagaataagaaactgaacatggcctgtgggtttgtatttctccagggcattcattttgtatgtaattacagactgccatgtactggtgtatatgcatgtaaggtatatatgcgggtggcaccacagtgaaatatttttgcttcttgaggacagaataatagcttctgttctttcttctatagggcttcaattttataaataattctgatcaaggaagaatgttcaagtatgaccagattgggagctaatgtgctaactgattattatatgccagacactgtgttaggcattttacaaaactgtaatctctcacaatttattcttgtgggtaggcattattatccccattttacagatgaaaagactgagatttcaactatcacagttacaaagttgaaaaggggtggagctggaattcttcctgagattggtttgttccccaaagttataccctttccaatatcactatactatcttgcaatcgacggatcattaagcaaaatatcgggatgaattctgcaggacagagccaggactcttccatgagtcattagtcaggtaaagacacttaaggcacataattaggcaagtatgtagttttttatttaatattggtttgaggaaactagctctaaataaattaggggaccaattgggaacctttgatatggtcaggttttagaggagatgagaaggataaaaggagaaagttgtttgaaaaaaatcaagttacaaaatactgcgatttcatttttagatatatggatctgtctatctatctatctatctatctatctatctatctatctatctatctatctatcgtgtaacacatatgttaaagatgtaaaatacccattgttttatatatctgtaagaaagaaaaagtgctgtcaattaattgcaagacataattgattatgaaagccatcctgatttcaaagatgttaaatgtgagaaaaaaaaagtctgtgctgcaatatgtaggaaaagatccagagaaatgtgcccgaatgttgcagtggtgatttccgggaggtgacagtatgacttgcgttttatgattgctcgtctgtgtatgcagatttccctgatccactctcatcccactctcaaaggttcaagtaggtgatccccagccccaggagaaccacttttaaactctttcagcatgtcacgcattagagttcacacattagatttcaagcattggctttaggatttggggatatacatctcccgtggtattgatcttagcatttgaagcctctgccaaaacttcacggcaacaggaataaaacacacttaagagacttttctactacacacctgattcaataataggcgagatacgagttgttagcaaatgaaggaaaagcatgctgttcaatgatgaacgttcttaagaaataatatctaggttaatgtagtacttttagtaaatgcacagaaagtacaattctaataaataaacttgttttatatctttaatttccatctagaattgactcgtgttagattttttgtggtcttaaagataatcataaatccaacagtaatatgattagctcaataatttttcacttggggaatacatgtagatattttgaagttttatgttaaggaatgcttgaggttatttttaccaaacatcatgaagaaaatataattaattaataaatattacagtcttaaatctattatttaaaacatggaaaattttcatataagctactttattgcattccttcttttattaagtcctaggataattttgtattctttttgaaagtgtatgctttcctccctttgcttggttacacagttggacttatttaattttctaatacagtgcaagattattttactattcaaaagcgattctgcaacttttacatatttgccaacaatgcaggatatggctactgatccaaaatcatagtttgtaatcattttaactcccggtcctctgtattgtttcaatcatggccatgaagccaccacctactccacaggagagcttgccagcatgcgctggaagtgtgtggatgccaatgagtgatttcattgcaaggttgaaggaggcactttaatctaaagctgatctcttgattcatacttgccaagattttgcctacattcttcagatggcttaagacagggaagggcataagctttggtgccagactagctttagttaaagcccagcaacttgggactgagccccaggtcccatgaatgcaggtcttcatcagcaaggctgggagcagaccacagtgaacattgtgacttctcagttggagctggtttaatttgtggtgttgttcagctctgcatgggagacttaaatggagtcatcactggctaactgtaggtatagtgaaaacaggcacatagtaacatttgacaaatattttaaagcctacctgttttccacagacctcacctggccaacggagaagtgcaattactagattataatcagatctatgattatttgttacctttattaaaacaattctatatattttattgcatgtaaaagagtaaaatggctatctttaagtaccaaatactccaatagcagggtagcaacatttatttacactacagcttggtatgtatatgtgctcaattttttttaacctatacttggtgtgagtatgagcacctaggctttgagtagtgggggaaaaaatattaggcctagtccattccaatgcaattattttaaaaacctctttaaatattactcatttccttcagcaaagttatcttctagttcagatttctcctttttcagatcccattttcctgtgtcctagctagggaggcatctggtgtgcctggtgtatggaagcctgaaggactatgcagtgccttgtgttctgcttgtatggctcttcaggtagctgggaacatgatgtcccctggtgctgaagttttttgcagatactactcatgatcttgtctccctcagctgagtttcagttcagtagcccctccgagctgattcagctttgccttggctctcattggagggagattctttccacttcctccatttgtcctctggccagggctggtaaccccagcccctgatgcaggagcaccaacttcttgccaagttggtgagtttctccctaagaaccatgagaagttctgaatcctatccatggttaactgactgcagaagagtgagttggagaattaaacacgaggggcctctctgtccaacacccctggacctgccaaggttacagtgatgtggctgtgtaccaggttggtgtgggatagcctgaaggatattccttcctagagttcaaaaaggaaattggggcaggcttcctataccattcaaggaccaggaaagatgtaaatgggtggcatgcccaaaagggatgcctgattccagaaagcttagtgaatgggccatcagaaaaatgacaagagttaagggcatcaaacagtgttgaagcaccttggaacagccgcagtaggaagtcaatacagtccttaggccagaggagagttcttggaaccagacgatggctgagctgtagaagggagctacctaatgggagctttggcctgtggtagttgaaagctgaaactgcaagatgcagcctggcagggagggagacaggcaggactagacatttgctaaccactcgcttctgccctccagtgtcctgcaggggcttcccattggccaagggcatgggaatcatattgatataatccttaggtcatctcctgggcacagagaagggtagaggagggtagagagtgggtctgaaggagtgaacagaatctccagcagattcttctctaagtgtaacccatttcatactttctgggccaatgcccagagagaaaggtgggacatacacatctcagggcttagctctcctcattctctcctcctttcctcttcccacaatctaccagggatagagccagaggcacatacctcctcggtaagtcctagatatctaaggggtatctaaggggaactgcttgggctggatgtcctgggcttggcttttgctatgccaagagagaaataatgatatgtagaacattgcctcaaaaaaaacttttttctgcatatctcttttcttgctggtaaatccaatttcaaatgccaaaatcctaaatattaaccttttctttgtgtttctttaacttctctgtcctgccactggcagatggatgccttagaccagctaggaaaatattacattttgggagaggcaaagagaatacttttaaaaactattactccccaatttcatgctgctgtagtttgtttggaaattttaaaattttatagcattttcaagtatattatctgatttaacatcatttaaccttagcaacaatcctacaaggtatccattttacagatgagataattgaggtcaaacgtactctgctagttaatagcaaacccacaactagaattccagatctcctgactcccattagagtgctccttcttctgtgccagacagggggccacagtttgcacatttggaaaagagaaccaagttcatgaaattggttcataatatactggtacttgctaaaagtggtgacttgagcatttgcccagtgataattgctttcactgaaaaattttttttaactttttctaatatctgcttccatggtaactaggtaattttatacttattttattgcccttcttgcattatcatctgtcatttggtatctttcaccatttgcttttttcattcctggttttgacttcatttcactagttaattacctttttaatccaactcctctttttaactacttcttgattcttgaattatcctttgacctcatcatttgattgctgctttcctaactcagtgagttgaacatattctgctaaaaatagcagatcttgttttcattttgtctctgtttatgtgacaccctgtgtataactcagagagcaccactgggacaagatgtaacagggaaaaatatgtgcctaggtagagaaaggatgaggagagcttaaacctagactaactagcaacctggtctctgggcagatttcttgaatgggtggtttctggcagtgagactttgaaagattcgtgatgtctctgaggagtgggatgtttggcccatcagagctgaaggccagttcagagtttctcactttgtaaggtttatgcgctccccctctgaaaagtggaagctaccggctgggtactgggtctgtctttccctagattcactcgaagtttcccaattcatgtattaccagttaaacagggttttgaactttcttttcttactagaatatagaaggtactaaagatgtttgatgtcttgaaaagtctaaggacctggaactgttgtttattccctggagcatgtcttctcacgttatgaagatagggaagactgagaatttgggttccagctaagtttgagcagtatctgtaagtccttgggccaggctgagtggggagaagtccacagtgtgttgcagtacccccaggactgtctgctgacccccactgcaggggtggggtggagcttactttctgggtctatctctcatagctgtgcttggaattgctgctgattcctggtttagatcgttatcctagagcattgactaaaatgttaaatgacctgtaagttacattgttttaccaagaggctgttccctacattctcttgagtctgtagtctcataggttgctgatgttgcataaaactggtacagcctctctgggtgatagtttagcagtaggttacaaaatgtccatgccatttgactgagaaatccaatggataggaagtcatcgtgaagcacctaatgacttagctaggagatgttcactgcagcttcccagcaaacagggtaaattattaatcatccataagacaaaataaagcacaaccattgaaaatatataaatgtatatgtgtgtctttacacacgaaaagatattcataatatcctattgaataaataaaccaagtttgcaacagtaaattcagtatgtgtatatatatatatatatatatatatatatatatgaaaatattaatacacctatgctcagaagaaataccagaaaggaaggatcaaaataccaatttttgggtaatatgattaatgttgattttaattaatagtggataattttactgtcttctaggatgatcagatattacttatgaaaaaggaaattacttagcattgaaactggcttctggcatagagagaagggatgaggatctgatgaacgtggatcagcaatatgccacgtttactaatgtttgttaccgtgttggcagtgacatcagggtgccaatggcacactattgattcagacataaggatgtgaataccagggactcaagagaagggacagcttcagaactatacacacttgagccatatttttattctctttatctaaaatgttctgattttgtaggataattatttgcctttttctttttactttagacaaaatccattttcatttgtttattaaataattataagtacacaaaagaatatttacaatataaaggtaaagtggagaaaatactcatgaacagaaagtcagtgtccagaaatggagtatgaccattgatcctgtaagagttccctaaggcagcagtccccaacctttttggcaccaggaactggtttcgtggaagataatttttccacagacaaagggtggcggtgatgtttttgggatgattcaagcacattactttcattgtgtattttatttctattattattacattgtaatatataatgaaataattatacaactcaccataatgtaaaatcagtgggagccctgagcttgttttcttacaactagacggtcccatctgggggaaacgggagacagtgacagatcatcaggcactagattctcataaggagcacgcaagctagatccctcgcatgtgcagttcacaatagggttcgcggtcctatgagaatctaatgttgctactgatctgatgggaggcagagctcaggtggtaatgcaagcagtggggagtggccataaatagagatgaagctttgccagctcgcacacctctcacctcccgtggtgtgatctggttcctaacaggtaacagaccggtactggtccatggcgcgggagttggggacctctgccctatgggatcctccattcctttctcctttcctctctggcttgagaaaaccacagtcctaaattttttattattgctttgcttttctttataatttaattcctaagtgatattttagttttgtgtgcttttgtacttcattaagtagaattatacttattcttctgcaacttgcatttttcactcgatatcttatttccaagttttatccatgtggtgtgtatagtgatagttcattcattttgctattgtccagtctttatcatggaaatgcaccacagtatgcttatgtattgtcctgtttatgaacttttgtgtgacttacagtttgttgacactatgaaagcttttattaatggcgtctgatgtgcatgtataacatctaatgctcatgtaggttgtctcaggtctatacacagtggaattgctaggttatagggtatgtgaatgtccaattttaatatacaatgtagaccatgctaaatcattttccaattatttttatctatttatattcttgccagcagtatatgagagcttctatctttgcacagtcaccaacatttagtaatgtcagacttgtaaatttttgctaatctactgagcgtgaactaatttaatttgtatttccctgagcatcagtgaagtcaagcatgtttgcttcagtgaagtcaagcatgctttcctgggtttattaacatttgtgatttctgtctataaatcatctgttcaggtcttttgacccatatttctattggattatttctggttttaaagtgggtctgtaggaattctgtatatatcgggaacaaatctttttagttatatatgtgagagatatcttcttccaattagtggcttgtcttttcattttccatatagcgtctttgataaagagccattattaatcttgttcgtccgtttttcatggtttgcctttttgtgtcttaagaagtcccttcctaaccagaggttcataaacacaaacttctagattgtcttctaaaatgtttatagttttgtccctgtgaatggtttaaaggtgtccaatgtgttttttctatagagataactgttctaggacaatctattaaaaactcttctgttgtaggactttctccttagttcagctaaaaacgggtccttgtcacacgaccatgaaagattaggcttgcagacactttgaagggtgagaaaaatggaatttattgggtgaaaaggaaaaaaactcagcaaagcaagagagcttcctgttaacagatccccatctcacagatagaattcccagttaccaccccggaaaaagaaaggacagactcctaccccctaaaaccggcagaaacttccatggctcaacctgttctcccagtgctcaggccggtgggagtttctccagggacccctttgtatttgaatgtttcattttctttccctacagaggtgtaaatgccagctgactggaatcatgtcatagatgaagtttctctctgagtgtggacctgtttcctgggttccctggagaacacaggcatttgagtcagccagatgttgaggggccctaccagggaacttctttatattttaaataagaagtcatttatctcacataacaagttagaagctattctgggttaacccaaggcacaatgatggcatcaagaaccccggctcttcccatattttcctctgccagagtcagtttgtcagtgatgattcctcacagctccaactgcttcgagccacatctgcagtggaaaaaaggcttcatattttaaattctaacctcaaggttgttgtggacgacccaggtggtgtgcattcaagttgcaagctgctttcccatgcagtcccactcagggtcacgagttctcaggggaggatttttttctctgtccattcagtcctgagtttcaagatgggcaacttgcctttcagatccctgtgtaaagaatgaaggtatttatttctagttcacctgactctcagggtgcagcccttggggcctacaatttacacaggaatctcacattaaacccctctccatgggcgggccttgggctttgtcctctgcccttacgcctcatgagacagtgaagagctaagctggaattcaccaaggtggtaaatgtagacctccctgaaagcttgtcctgtttacatctctgccttctcattttctcttaatttttttctttttttggcttcttggtattctttgctttcttggagctcgtcacacatttaggaggatttttgtcttttctggaatttttagttgttttttggtgggagggtctgtcagtgcatctagtcctccacactatggaagcagaagttggtttaaattcactttaaaaattgccttctgttttatcaattctgcctaaaggtttgttggagactgaaccgttgcaaggaacagacgaagatgcagtagccagtgctgacttctctagcatgctctctgaggaggaaaaggaagagttaaaagcagagttagttcaggtatgtttagtaatcttattgttgctatttctatctctggatcttaagagttattattagtttgatataataattgtaatgatgttgtattgtaatgatgttgtctttcatttaataaaatttataaatgaatacattacaagatgattcatttttccagggtatttttctactgttacatattacttattagttacagttgtagaatgaatcattgtgctgcttaagcaacaataataaccagttttaaatatacacttcttattctttttactgtcagaatactatgggaataataaattacttacaaacctgatagaattcattccagaccatgttataggtgcaagatccttttgaagatgggttctggttttaggtcagcaacttagctcaacaattactttgaaatgatttttttaaatgaaaaagtcaatcatagaagcaactgaatttataagttgtgtactttttggcagaaaaataaagctctaggggtagagaggaaagcaatgcttcatcgaggcctaattagatcttgtggagctgctgtggggatccggacctagggaggaggaggatgtcaggctcattatgaatacacatctttgttcaagtcttttgcttgcaatacccactttagacactttgctgacaagcctttactttctaggaggagagtgttgtaaaaagggctccttgagtaggaggaagcagcagagccagaggagctgaggccaacattccctctgcattctgtgtcctggctcataggccaggaagatcctgttcccacagaagcaaggcttggccttcctgctttggcctctccacaggctgaggacacagctctgagctccaccttaccctctccccactttgtccactctgaactctgagttctagcctcctgatagtgtttgtctatgacagctcagaataatattaaagattttcaggtgcttttacaagacacacctccaagttaatttcatttcaaaatgaaagagcagcacgttcctctggtataaccaaaaatgatttcagtaagcacagtgcctcaaatctttagctgggtctgtctgtggccactgagtggctgcacgtaccagagtgcacagaccaaagttagcattaacagataatggactgactccacatattcttatggcctgaaattctggctcatgactagttcatgtcaactgcagggtccaaatgtcatgttctgcagagtggggtaagccaactgagtctaagctaaaacttcactccatcatggtgataatgctagtttaagtttaggcacaatgtctgtaactgaccaatttctataaaatgcctcgatttttatttttctgggctgtaggattactggggtatacatacatacatatactaatacatgctgatttttgtacattattttctaaatgtcaacagtgagcatgatactacttttataatcaagaaaaaagtaagtattggttttaaatggatgccccatgaatatgaaaaaatagaagtgttttcagaaattcctgtctcatttggccacagtaatacacttccagaacatttcactcctaagagtttttgagcctgacttctggaaataacaccagactctttgttactgtgttcaagttaccaggattcatgttttgcactagcctccatgcttcctggctcttatttctgggttcttcggagatgaagaagtaccgcatgctgccaaaggtagcgtcgtgacttccaggggcacatgagcacagctctctgccccaggcctggtgaaaagcagagaaagtgtatctttgcgatttttcttcttcacatttctctttctcctcctccacgtcaggccacctctgctttatgctcattctgtttttaaaacagctttccttactcttttacaagtgtgcatgcggatgtgtggacacaggaactcaagttccctgatagcacgtatgcattcggattttaccttcaatgctaggattcaattttaacaaggacacatagaaagccatctctgcagtctcactgctggccttatgaagaactgaggcctcctatagagtcagcccctctgccccaattctccacagagattctttatgggcccctggtcacagacaactcctctttctgtctgaggagagatcctactgggtctgttagctccttgggtaccaaagatacctcagagaccagcctattagatgacggccttggagtcaggcactcagttgtggtcatgatccaaagcaagacctgtgtgtacaaggacttctgacccctgactgctttgctgaaaagaggtcttgagtgtgccaggtgtccagcctcctctttgtttccttcctctccctactttcctcgtctcttctgtgaaataaataattcaaaataaaagctgttgggactttaaattattttgagccttgaaggaatgtgaatatgggacctgagtcacataacaggcagctgtgacctaggcagctgtaacctgtttctctgattatagactagccttttcattacctacattgttttgtaaaatgctataaaagactaaagggcaccagagaagacctcttttattatagattaacttccctctttattctcttacacaaacgccttagattgtctaagatggaatgttaaacatatacttttaaactggaaaagaaaaagaaaacaaactgtaactaatcaaattgctgtaactcataaaccagcaatatatgaaaaatgctgtaatcctattaaatttctttgttttctgcctgtgtaaataagaccttaacttttcagcttcatagcactaaccacattcctttagagtctgtgtttcccagatgtctatccttagcttttcacttgaattaactcttaaactggattctgatccattttattatttcaggttgacacctcctactgctttctggctatgctggattccttcctcccagctctctttctcttccctcccctctgtcttatcctgcattatcttgttgataatattcccatgaggttgcccttagacttcaaccaatctcataaccccattctctcacacagccaacatatttttgtgtgcttaccaagtgctggcaagaggaagacttcttttggtaggaaacgtaaactaagccagtagtgtccaaaaggcttacatcttggacaaattcagcattttaaaagaggaatctcttggccagctgtggtggctcacgcctgtaatcccagcactttgggaggccgaggtggggggatcaccagaggtcaggagttcgagaccagcctgtccaacatggtgaaaccctgtctctattaaaaatacaaaaattagtcaggcatggtggcatgcgcctataatcccagctacttgggaggctgaggcacaagaattgcttgaacccaggaggtggaggttgcagtgagccaagatcatgccactgcactccagcctaggcaacagagtgagattccatctcaaaaaaaaaaaaaaaaaaaaaaaggaatctcttttaacataacttgatctttaatttattgttgtggtcatgcaatatgtatcttttttaaagttcatcaagtgtgaggccaatatcacctctgatctggtgcagtggttcatgcatagaaggaatgtaattaatatttataattagcttgagttattttatattttaagcaaatatttatatttgtaaattccaaaagtagaatatgctcttttttttacaaaccttgtcagtaaataaagaattaatcttttgtttcagatatttattctcattggtcttattaccagacaccttttctgaagtctttacacacctgttttttttttctctctctctctctttaagtacacttgcccaataattctgtgccactatcatcccactcccactttaatttcactaagctgcattttatgtttagtatttcataatgtgtcttgccttttgaaaaggataaagttttggcattagtactgtaaatttgtgattatataacaatcaagtactgccaatgtccctgagataagatgacttaagagaaataggcattaataggaataggaaaaataccagacagcattatcaagtaagtaaagcctattttcatgctctctcaatctctcctttggctctttcctcttcctctggtctgtgcagtccccaagaacacacagtgctctcaagctaacggtgtcttacacttgcaaagaagtgccttaggctctgggcctctctctctctctctctctctctctcagctccttcctgaagaccttaactctttctggactgagctagtgaacagctaatgtcttcataaccataatatcttattgttttgcacctcttagtcagtatctgcattttaatcttgggtctcttagccaaaggcaagagtagcccagagaggcaggccttgaagccacgtgcacgtgagaccaaatgtggttactcctaaataacatactgatgatgcctagtttatgaaaatagttttccttctgggttgcagttagaaattttatgtaatctagcagataaaactgaaaaacaaattttataaatttcatactgaagctaattcattagctaattcagactagttagttcacttttttgcatttttctttagataaatttatataacataaacttatccattttaaagtgaccaattcagtggcatttagtgcactcacagtgttgtgttgtgtaaccaccacatctgaaaggaaacttgtactcattaagcagttgcttccatttcccacttcccagcctctggcagccgccagtcttcattctatctctatgggcttacctattcttgatatttcatataaatggaatcatacaatatgggaccttttgtgtctggcttctttcacttagcctgatgtttttgaggttcatccatgttgtagcatgttttagtacttcattgtttttatggctgaataatattccattttatttatctactacaatttgtttatccattcatctcttgatggacatttgggctgtagtcacctttggtctactgtgaatagtgctgctatgaacatgtgtgtccatgtatttgtttgagtaccagttctcaattctttggggtatatacctaacagtggaattgctgagtcctggggaaattaattctgtgtttaactttctgagaaactgtacgactgttttccacagtggcggaactattttacattcctgccagtaatgtacaaaggttccaacgcctccacatctttgtcaacacttgttattttcctgttaattcatatttaaataatcaagtttaaatatctaatattgggcataaatattcatcctacaaggagatcttctagggagtcaagaaaccaaagaactagaccattaatttgcaatgcagaaataattaaaattaaaaggaaaagatatattaaatactttaattcattaacatgatttacttgcacttcatctcattccaaattggatgtggcttacagaagtacttacagtttagagtttccatactccttgtatcagaatctctgaggatgcttgctgataacacaagcagtctggctccaccaaatctaaggccttgaactctcagggcattaaaaggcagcagatgcctgggaatctgcattttaaatatgctttcttatttaaactgaagttgagaaccactgagataactagaccaaacgatcgcagtcaaataaaggattgaagttcatcagcagcagcctttaaggtatttgtaagtaaagacctcattgtggcaggactcttggttctgtacaaagagaggttgttggccttttggaaccttacacgttaatgtaattaaagattgtctgtctttccaacttttgcgattagtttttggcatatatttagatctctgataaatattctgaacgttttgaaaagtgtgagtctttatattgcattgaaatggttagaattttattatagaatctgagaatacacccaacttaaatagctgacttcatgtcttcattattagaggtctcttccccatatgtgtctttgaaagtgtgcctgaatttttgaattattaagtgtgggactttatatttcttttttttaagaatgatttttgttaaattggtcactttaatgtttctatcgcttttgggggatgaagattttattaaaaatttaatggcagctctgaatcctttcctcactccccacctccagataacaaatgaataatccacagcccctcgtggtttttaatacacttatggggctccatggctatgaggttgagaatattaaggtgttcaagcctctttctccttgtgtacatctgtaatttatttcagcaagttaaaattttccccttatttttttacacagtggaaaatactgtaacactcaatatacccccacccccgccgagaaaaaacccagactcccagtaatttcagtcactctaaatgaaagaaagcagaaatggcctttttaatagagaataaaaggctgacatgaaccccaagcattttctgtggtaaaagagcaagagatacaaccatgagaaatattgggcagcagattaaatggaggaggacacattgacaaagatgaaaaagagaaatatgacatgataacaaaagaatagaagggcttaattttaaaataacagtgtattctcatttaatggagagactaaaagcattattctctttagtggtccctaaacatactccttttacagtaatcagtgtatgtatgcacactgaagactcttgctcatcaaggaaagacagggttctattgattatactatgtttgtagaatatgtaattcactttagattttagaaagatgtccatgtacatataaaaaatgttctgtgaacataaagaaatggataatgttaaattgccaggacattttgctgatattaaaaaccccaagatattgctacttcttactgtggtatttaagatgcttgtgattcagtatttctgcttgttttgcttacgtgattatttgtgtatataaaggttcgcaaaaccatttctgtctgttcactattggcgctagtgaaagactggggggttttattgcatgttttgcttttgcaaaggcagatgcccttcttgagctgctttcccaggagctgtgactctggtgatccaaggaacgcatttgcaagatgactgacagcctgacagggttggtgtgatgcagcttgtggtccgaagtagagtgacactttacagtaaatgagccacagttgctcctttttaaaaaaaatttagtaagaaatccactaaagtgacagagttttattacctccatgcatgtgggatactaaggtagttctaatgattcttttccggcttaacaaggaaaagtcacaaaatttgttttccatatttcagaaaacaaagatgtaaatgtaagcactgataccagagcaatatgttatagagtatgacaactaattaaaatcaaagactttgtgatttattcagatttattttcacaggatagaacagcactttccaaaatctgagtactttacagagctcttttgttagaaattgcatttgcaagagcaattttatagtgctgaagagatctgcttttctgtagcacaggggaaagaggaaatatgtccatacgaagccttgtacatgaatgttcatagcagctttatttgcattagcctaacctaaatgcccttcaacaggcaaataaacaacacactttggcatattcattcaatagaatactactctgcaaaaaaaggggaagaaccattgataatgcagcaacatagatgaatataaaataactatctgcaaagccaagcaaaaatgagtgtatactctatgattcaatttgtataaaattctagtaaatatctgcaaactaaaccctagggaaagaaagtcagtcagtggctgtctggtgagagtggattgggggaaaggaaagaagagggagggaggaagaagaagaagcaagtaaaaggtgatgaatatgttcacttccttgattgtgataatggcttcacgggtagatacatatgttaaaacttacaaattatacatatacactttaaatgtctgcagcttattgtatgacagttacaggtcaatgaaactgttaaaaagaaaaatcaacacaaatcactcttttacatacatcctctaatcccttgttccttcctttcttaaggcattagcttggcaaaaccccattgtctgccaattccattcctgcacctatgcaactgtgtgtggttggcaaaaaataaactacactgagaccaggcgtggtggctcacgtctgtaatcccaacactttgggaggccaagacaggagaatcccttgaggccaagagtttgagaccagcctggtcaacatagtgagaccctgtctctttaaaataaataaataaagtggcacttgagaagaagttatataaaataagggtacagtagaaaaccaatttttgttcaaaaattatgtctatatacaacttatagaaagaacatttggaagtttagaaaccaaaaaataagcagtggctatttcctagcaggatacaggtgatttttattttcttgtttatgtttttctgtacaatctcacttttttttttaacaagcagcataaattacttctataatcattaaaatgaaaaattctgtttctactttgagatattagactatcatctgtatggggtgtatttggcaaacctacacatgggattgtataaataggagggtcagaggctgctttggaatacccagagcttctgtaagtatccttttttgctggtctgacattttcccccaccatttcccctccgccttgtagctagaagacgaaattacaacactacgacaagttttgtcagcgaaagaaaggcatctagttgagataaaacaaaaactcggcatgaacctgatgaatgaattaaaacagaacttcagcaaaagctggcatgacatgcagactaccactgcgtaagtatcatatgaacagtgttttattaactcagcctgatgtctcctcactctgttgtgttttgtttcatttttcctacaaggctgatttggtgcatgaagctaggaaaaaaaaatactttctctaaaagcaaagcaaagaaatgtgaataatcattaagtatgctgcatgtgaagcagattctataaagtagcttcatgaaataaaactctgttcactgaaactctattttcactcagactactttcattaggttttattgtttaaatgtttttctctttatatttttaacatttgtcaaatatactttttttaaaactttttctcataaaaactataaatgggaaggtgttttctcctcagcacacttgacactcactatgtatgtcttccaaaagtggttggcagtttcaatactgacttgctggcaattgatttacaaagaaaaccttgtacttttcatcttttgttttgcacttttcattctcactattctagggaatatttagagctgggtttagaccagttttagagcttggtttagattacagttttggccctgtaatcccagcactttgggaagctgaggcgggtggatcacaaggtcaggagatcaagaccatcctggctaacatggtgaaacctcgtccctactaaaaaatacaaaaaatcagctgggtgtgatggcatgcccctgtaatcccagctactcgggaggctgaggcaggggaattgcttgaacccaggaggcagaggttgcaatgagtcgagatggcgccactccactccagcctggcgacagagggagactctgtctcaaaaaaaagaaaggaagaaatggtttttgctttgccattatcgtcctgtcttgtgctaggtaaggtacagaataatctcagttattctacaatcacactttttttattagattattcttaagttgcatgaaatatttaatgatgatggtacttttctaatgttgcaaagtattttacctgctgggggtcttgtaccaaaggggagtactccacatatgtgatgtgatttttcttctttttgtgtattgggggttaggggctgatgaggaaatcacagaggctttatccctagccgtaactttagtcccaaatttcaccattaagaaattgtctttgggttatgcattttcttctctactatcacactttggaaggtaaagatattgcattcctaatacctaagtgggagtcaatttttctttctcctaggcatagaaaggcctgatggtaggaagaggtaccaataattgacagcaattatttcagttttgccagcagccaaatttgcctgctggttcctaagaactaagatgtaagcctttttgctcctatgagaagatgtcctttgtatgaggaattgggtctaaaacgagcatgacatctccccaacttccttagtttccataagaatgagaatgtttttctccctctaaatatggcctagcagtcctattgggctctatgcttgtgcaccctaaggactcaatcagataggttcagggcacagcccagagtcaggcagaatgtagccagggagcttgtcagtttatctccagaagttaaccaacattccccaacctaatgatgacaattacgggaaaaaataagaaaccacacattgatgtgcagcaatttaaaagataagttgcaacaccatatgaacaatctcctgaaaggataactggattttaggcattaaattaaatgagcttatctgtcagtagttttggcctctgtctttccactttcgtggccaataccaattaatggccctgacagtgtaaagttgaacaagctctaattctctgggtttggtcacctctgtatttaatccaggcctgagggtttcgtataacactggtctgaacttccctgtggggtataagtaccaggaagaccttcctgcatggccttcctaatcacattgcataggtaaactaaccaaatggaaggtggggcaatgctggcagttttgttgctgaaggagagaggtgcctggcagggaggtgggaatgtctgagcagagggagtgtcaagtttgtgcaaggtctgccaggggaagggaggggagagactcatattcctcctgggactggaaatagagctggcaagttcaaggaaggcttctagcctcttcccacaggggataatgtctaatttgtgtttttccatgtttgaaaaactaataggttttatagccaggtagtctacttaatgtaaagcattttgctggatgaatagcctagatttattccctggggttatggagtttagagtctagttaggaagacagagtttgagtttttgttgttgttgttgttgttgttgtttgtttgtttgtttatacgacaaaatcatggacaagggggatagaaaggatttggagaacagatcaacagtggtttgcaggtggatgatgaaggaaataggaccaagtgtgatgtctaggcctttgacttgggctactgagtgagtgttggaactgtttacgagcattgtggttaggctcatggttgcttgggttgaaatctaggccttgctgcattcatgaagtgagatcatcttaatgccgatcccataggtagtgaagattcagtaagttaatgttcgtaaagcctgcaggacagcatctgacactttgtaggcatgaaatgattatttgctgctgtgagaaagactgagaaacaagtctggaggagaggcacaataattcgttttggctccgtaaagtctgaaatgcccaatagataaacagatttataggctgagaggacaactcagtgtaaaagtttaaggcagagatggacatttgggattcaactgcatatagataacatcgaaaactagatgactagatgagatttccctggggattacttaataaatacaaatggtcatgaactcactaacctttaggaatgaagtgaactttcctttgtagggaagaaccagtccctctctttaggaggaggcataagtctatcaaccatataatttggggaaagggtctgtccccaaccctttcttcttggttgttgagggaaggcagcggatcttaatcatatgtttggaggagcgataaaatctgtatccctctgaattaattaaacccctgctcttagtgctgtttatgatacccattccaggacaaaatctgcacctcatctgatgaaaaatttgatgtgaagaaatgatgagctatgatcaggttaggttaggtagaattagatttcaaagcactaaaaaaaatttttagctgtcagaggatgtgtgtgattcccagaggcaatactttgcatactgattaagcaatcatgacctatttagtttgatttataatgaaaagaaaatctatggtatgttaatgaaagatcttggcatatttcagtctgcagtaggattcaaattgaaataggccttgataagtaggaataattacacagcagactgaaattacctcctttacagaaagattccaggaatacaggaaaaggtcaagggatcatcggtatccagggtttcttgttgctgttgttcttgtcatagttttttacttgcctagatttgtatctaagaacatacaaaaaagtcctctccattttttggttttctgctgcctttttatgttgtctttagacttcaaggagacatgggagaggtgggtgactttggggtaaaggaggagaaattgaatctcttctgtaggcagaagtagaatcaggaaatacaactttatggtgggctattcaaagcagtgggcttcatgtattcaacaagtattctgctttgctaacccatgaaacatgaaatccccccactaataaacccctctgaatcgtgccacaatctaaatggtaagtcgacagagggcagaggttttggaaaggaatttaaactattccatctttttgaaagcttaataattttatcctacataaagaggacgaaaagcctcacattcagcattttaaaaacgcacagtgctcaaaaattgaacgttagtttatgatttatttactctttgattttgttcttctaagacttccaggccattaatggtcaggaattcttattatctctttttatgagggagcctggttgtagcactattgagttcaggagtgccagtgaagattaaagacctaattttaaaagatgtacacacccaatctctcacatggttgttcattctttttaccttcaggctttcatcttattacacaaggcaggaagtagattcttttcttctagattcaagtggtaaatttatgttctgataacatatttagggagcctttggaataaaataatcttaaatgtttttttgtatctttggtgaaatgctgcatattcaaccattaaaggaacactttcttttaaatctcataagaggaaatatattcgtgctgtaaaatatcttcttctaaaaagatgaattttttatttcttctagttgtatgtagaaaaatgctttatttaagtcaaaacaatttagaaaacaacatgctttctccttttgattattaacaccaatgttcaaattagtaaaacatgtcaagtggactttgcatgaaaagtcaacagaatgctttttatttggcttgcagagacccttacctcacactactgaagatcccctgttggcgtgctggtcaaacagctaacctgtccttgccaataaatgctatccattccagccaaattgagtttctgaaaagtagagcccactttcctgttgactttcattgaaaaacaggaagtttacatgtactcaacaccaaacatctctcagtaaacagtcttaaaggacttaatgcatatcaggtgctctataaacattagctgccattgctttaaaaaacattagctgctattgccattgctgccaaagaaaggcaaatgtttaactatgaaagtaatggcagctaatgttcagccctagaccagatttgagccttgttgggaagtgcaggtccctaaagcagtgttttctgctagaatggctttagaacacacaagggcaaatttctcttcactcacctgaaagcttcagttgttctcttgagttagaagcttcacattggaaactcctgattccgctcctgtagctgaagtgaggacaggcacagaacacagacttgaagcatatactttcaacgtttctgccacctaatgcacaactgacggcaactcaaagatatcttacacattcctgcttttacttaaggaaaacatattgttcctctgctctatcaattatgtaagtcagcaatggtgaacctatatttagcttaaagtaagagacctagcaatctgaaatgctaaatactatttctatttaagttacaagattgtcaagtcaatcaaggtattagtatttaagttgtttttcattatttgaatattattgcacatagttttatatgatagggttgaaaaacaatcttaagtattaaagatgtgccagattctatggcataataaagggagtaaaatgcaatacatcattgagtgccatggctcacacctataatcctagcccttcaggaggccgaggtgaaagaatcacttgagctcacgagttcaagatcagcctgagcagcgtggtgaaactgcatctttacaaaaagtgcaaaaaatcagccaaatatggtggcgtgcacctgtagtcccagccatttagggggctgaggtgggaggattgctagagcccaggagatggaggctgcaatgagccatgttcactccactgcactccagcctgggtgaccaagtgataccctgtctacaaataacaataataataataataataataataataataaaacaccaacttcttttggctgataggaggggtttttttccccaagactcaggctcctagcttctggatggggacctatcttactcatgcaactttaagatcaagttcaatcaggatgcagcataaggttacagggcctgtgcaatacgtaactcctgaggtaccatttgcttagaccaggcatgtccaatatctgggcttccctgggccacactggaaggagaattgtcttgggccacacataaaatacgctaaggatagctgatcagctaaaaagaaaaaaaagttgcaaaaaataaaaataaaaactcataatgatttaaggaagtttatgagtttgtgttgggctgctttcaaagctgtcctgggccacatgtgacccataggccgcaggttggacaagcttggcctaggctatggtgtgagtgctgctccttggtgcttttaagtacttggagcccaatggcctatttctcatggggtctctgattactttgttcttgaaaatcatttcccgacatataaccctttctcactgtttacccttttgaaatctctttcaattgttgatttccaagtaatgtatataaaatagcaactaactgttttcaagaaatatgatggttagctgggctcagtggcgcttgcctataatcccagctgctggggaggctaaggcagaaggattgccagagtctaggaattcgaggccagcttggataacatagtgggatcccaagtctatatatatataaaaggaatatgatgtttagcctaaggaagaggtgtaaaaatgtggggggaaaatgtgcattttagcattcttgaaatacagtattatttctctctctgaacactggtactgtagaaagctgacccaactcacctttaaatgtctatcatcttcaaggcagcaagacattttaatggaaagcaggcaccctggactaggccctagacttacctgtgtcactaagattcacataactcttttgggcctcagtttcatcatctgtaatctgaagggatttagctccagtgcccttcagatttaacattaaataattcttggaaataaggagtcctaaaatctttaacactgcattaaactacctgtatagctgaattttaaccataaaatttcatatagaaatagacttgcatttttcatggtggggacataaataatattaataccacactaaagtaatcagatcactgcatatgctcacctcccattttgctatagaaatgtgtttaaaacacaatgtagctatcacctattttcaatatatacttctctctagctagctatatttaaattatgcattaaattcagaatgtcacacacacacaaacaagtgtttaaaaaatcatatcttagttcaaaacattctcaaatatataaagttaaactacatggaaaagcttaaaagaaaattaaatattgggtctaattgtaagaattcttgaagaaatgtggaaccaacacaagaatgaattctctaactagtagccagtcccaacttcatgcaaaagccacagatattgcagaatatttatttacttttcccttgagtcacgtttcaggccacacagagtcagtggcaggtggttgctcaatagactttcttcctttcctccacccttccctggtttcctttttacccttatcactcccttctccctagggctcagtccattctgcaggcaccccaagtggccaaggccccagggacctctggccttgactagacagaaagaggttgcttttacagtcttctcaagggtgcaggcttaagtctttttaattcttcaaaatgggacatttaaaatacagcacaacccttttcgtgccatatttgatagcatcacaaagcagaacagctagagcagagaccctaaggtaggagggggcctggtatgttccagggacagtgaggaggctggaaggtctggagcagagtaagaagaaatgagaggggaccagactgtgtagggccatcagaaggcccaccaggtggactttggcttttcaccgtgagtattatgaggagatagtgcaaggttttgagcagagacctgctccaatttaatgctttaatgggtccctctggctgcggtgttgaaaagggactgtagaaggataaggtggaagtatggagtttagttaggtgattgcaagagccccggtgagtgatgatggcggcttgaactaaggtggagagtagtggaagcagtgagaaagtagactccacatctattctgaaagttgaaatgaaccaacagggctttcctgatgaatttgatttggagaatgaaagaaacagaaaggttaaagatgatgctagtctcctattttgggcattcaatagattgttctattttcttaccaaaacacataagtttttgcacaggaaagtttttcttgatgtttttcagaattatgatgtcagtagagtcctggattgagcctaattctgaatcacagtccatagtgtaataatgtttcatcagcatataatactgtactttcctcacttccaactcctttatttatttaatttatggcgcaatttcagctcactgcagcctctgcctcctgggttcaagcaattctcctgcctcagcctcccgagttgctgggatcacaggcatgtgccacccagccctgattttgttttgttttgttttgttttgcttttttagtagagacagggtttcaccatgtttgccaggctgatctctaactcctgacctcaggtgatccaccctcctcagcctcccaaagtgctgagattgcaggcgtgagccacgacgcccaggcttgaactccatttttaatgcccttttcacagatctgatttcattacccagttactacttactgaaaccttcatcagcatcctaaaaatataactgtggtaggaagtccagatttttctttatttatttgtaagtaagtcattttgttcttaaggccaagacactacatttacatcttgctttctgagtctagttaatccaagtgttcaagacactgctttggaaaactatttagtagcaggcttcttctgaagaattcttagcacatgacatttcaagatcacacctcactaaaatcttctaatgatgattggtgtttttatttctagtctttaacatttttagtatttttaactgtcttatcactaatgacaatttagataataattttttatctttttaaattttatttcaatagtctttgggaaacaggtggcttttggttacatggataagtttttcgggggtgatttctgaaattttgatgcacccatcacccaaacagtgtacattgtacccaaggtgtagtcttttatccctcacccccctcgaaccctttcccccgagtccccaaagtccattatatcgttcttatgcctttgcatcctcacggcttagttcccacttagaaatgagaacatacaatgtttggttttccattcctgagttacttcggtctccaactccatccagattgctgcaaatgtcattatttcattctcttttatggctgagtagtattccatggtatgtaggaatatatattaactagactcagaaagcaagatttaaaagcaagatttaaatgtagtagttttggccttaaaaacaagaggactttttacaaataaataaagaaaaatttggacttcctaccacagttatattttatatcacattttctttatccagtcatcagttgatgggcatgtaagctggttccatatttttgcaattgcaaattgtgctgctataaatatgcatgtgtaagtgtctttttcatataatgacttctttccctttgggggaaatcccaatagtgggattgctggattgaatagtagttatgcttctagttctttaaggactcttcatactgttttctgtagtggttgtagtttacattcccaccagcagtgtaaaagtattcacttttcaccacatcaacgccaatgtctattttttttaatttttaaattatggtcatttttgcaggagtaaggtggtatttcattgtagttttaacttgcatttctctgataattagtgatgtgaggcattttttcacgtttgttggccatttgtatatctgcttttgagaattgtctattcacgtctgtattagtctgttaatgctgctgataaagacatacccaagattgggtaatttataaagaaaaaggtttaatggattcacagttccacatggctgggaatgcctcacaattatggcagaaggtggaaggcacatcttacatggcagcaggaaagagagaatgagagccaagcgataggggaaccccttataaaaccatcagatctcatgagacttatttactaccacaaaaatagtatgtgggaaaccatccccatgattcaattatctcccaccaggtccctcccacaacacgtagaacttatgggagctacaattcaagatgagatttgggtggggacccaggcaaaccatatcaatgttttttacccactttttgatggggttgttttgttcttgctgatttgtttgagttttgagtttcttgtaggttctggatattagtcgtttgtcagatgcatagtttgcaaagattttctcccactctggtttgtctgtttgctgattatttcttctgctgtgcagaagctttttagtttaattaggtcccatatatttatttatgttgcatttgcttttgtgttcttggtcatgaactctttgcctaagccaaggtctagaagagtttttctgatgttatcctctagaatttttatagtttcaggtcttagatttaagtctcacattcatcttgagttgatttttgtgtaaagtgagagatgaggatccagtttcgttcttctacatgtgactttccaattatcccagtgccatttgttgaatagggtgtcctttccccactttatgtttttgtttgctttgccaaagatcagtttatgtaagtattggcttcatttctggattctctgttctcttccattgttctacgtgcctatttttataccagtaccatgctattttggtaactacagccttgtagtatagtttgaagtctggtaatgtgatacctccagatttgttctttttgcttagtattgttttggctatgtgggcttttttgggggttccatgtgaattttagaattgttttttctagttcagtgaagagtgataatgatattttgatgggaattgcattgaatctgtagattgctattggcagtatggtcatttttacaatactgattctacccattcatgagcatgagttttcatttgtttgtgttatctttggtttctttcagcagtgttttgtcattttccttgcaggtatctttcacctacttggttaagtatattcctaagtattttattttttattttttgcagctatcgtaaaagggattgagttctttatttgattctcagtttggtcactgttggtgtacagcagtgctactgatttgtgtacattgattttgtatcctgaaactttactgaattcattcatcagatctagtagctttttggatgagtttttagggttttctaggtatgcagtcatatcatcagtgaacagcaacagtttgacttcctcttttctaatttagatggcttttatttctttttcttgtctgattgctctggctaagacttcctgtactatattgaatagaagtggtgaaagtgggcatccttatcttcttccagttcttgagggaatgctttcaacttttctcccatttagtatgaagctggctgtgggtttgtcatagatggattttattatcttgaaatatgtcccttctatgctgattatgcagagatctttaatcataaagggatgccatattttgtcaaataacttttctgtgtctattgagatgatcatatgatttttgtttttaattctgtttatgtaatgtatcacatttattgacttgcatatgttaaagcatccctgagtccctggtatgaaatccacttgatcatggtggattatatttttgatatgctgttggattcagttagctagtattttgttgaggatttttgtgtctatgttcatcagggatatgttttcttttcttgttatgtcctttcctggttttggcattacatttggtgataccagcttcatagaatgatctgggaggatttcctctttctctgtcttttggaatagttctggtaggattggtaccaattcttctttaaatgtctgatagaattagctgtgaatgtatatggccctggacttttttttattgtcaatttttttattactgtttcaatctcgctacatattattggtctgttcagagtttctatttcttcctgatttcatctaggagggttgtattgatatatttccaggaacttatccatctcctctagattttctagtttgtgtgcatgaaggtatttgtagtagccttgaatgtttgtatttctgtggtatcagttgtgatatctcccatttcatttctaattgagcttctttggattctctctcttgttttcttggttaatcttgctaatggtctatcaattttgtttatctttttgaagaatcagctttttgtttcatttaacttttatatcttttttttgtcagtttcatttagttctactctgatctttgttatttttttttttcttctgctgggtttgggtttggtttgcttctgtttctctagttccttgagatgtgacattaggttgtctatttggggtctttcagactttttgatgtagtcatttaatgctatgaaatttcctcttagcactgcttttgttgtatcccagaggttttgataagttgtctcactattatcattcagttcaaagaattttttaatttccatcttgatttcattgttgaccaaagattattcaagagcagattgtttaatatctatatatttgtatagttttgaggcttccttttggagtcaggatacttgatatgaatttggttttcttaaatttattgagacttgttttgtggcctatcatatggtctatcttagagaatgtttcatgtgctgatgaaaagagtgtatactgcaattgtttggtagaatgttctgtaaatatatgttaagtccattagttctagtgtagagtttaagtccattgtttcattgttgattttccatcttgatgacatgtctagtgctgtcattgtagtattaaagtcccccactattattgcattgccatctatctcatttctcaggcctggtagtaattgttttatgaattttggagctccagtattcggtgcatatgtatttaggattgtgatattttcttattggactaatcctttcatcattacataatgtccctcttggtcttttttagtgttgttgctttaaagtctgttttgcttgatataagaatagctactcctgctcacttttagtttccatttgtgtggaatatctttttccacctctttaccttaagttgatgtgattccttttgtgttacgtgagtctcttgaagacagcagatacttggttggtggtttttaatccattttgccatcatgcgtcttttaagtggagcatttaggccatttacgttcaaagttagtattgagatgtgaggtactgttctattcattatgctagttgttgcctaaatactgttttgttttgtttcattttgttcttgttttataggtcctgtgagatttacgctttgatgaagttctattttggtgtatttcaaggttttgtttcaagatttagaactcccttgagcatttcttgtcaggctggcttggtagtggcaatttctctcagcatttgtttgtctgcaaaagactttctctctctttcatttatgaagcttagttttgctggatacaaaattcttggctaattgtctgccaattattttgtttaaggaggctaatgatgggaccctaatcccttctggcttgtaagatttctgctgataaaccagctgttaatctgataggttttccttaataggttacctgatgctttttcctcattgctcttaagattcttttctttgtcttgattttagataacctgatgactgtgtgcctatgtgatgatctttttgtgaataatttcacaggagttctttgagcttcttgtatttcattgtctagatctctggcaaggccagggaagttttccccaattatttcctcaaataagttttccaaactaaaatttttcttcttcctcagaaacagcaattattcttaggtttggccatttaacataatcccaaatttcttggaggaggctttgttcattttttttctttgtctttgttggattgtgttaatttgaaagccttgtctttgacctctgaagtttttttctacttgttctagtctattgttgaaactttccactgcattttttattttcctaagcaagtctttcatttccagaagttatgattgttttttccttatgatatatatttctctggaaaattttttattgatgtcctatatttgttttaagtttctttaagttagttttcagccaacttacctttctcttgtatctccttgagtagcacaattctgaattctttatctggcaattcagagatttcgtcttggtttggatccattcctagggagttagtgtgacctttcatgggtgttatagaaccctggtttgttttattactagaattacttttctggtttcttctcatttgggtagactatttcttaaaattgttcttgaatttatttttgcttaaaattttttttaacttaaatttatttattccctcttaaggattagactttaatgtttattttagcctaatttaattcttggtgcttgtagggttgaagactcagtatgagatccttagttacagaaagtttttttgtgtgctggctttcccttatgctgtttgtagttgttacattcttggtgagtgggtgagttcactgcctcttatggagttggaatggcaggtatctcttgaagcttatcttgttctctcatggtgtaccctttatttatttatttaacttttttcccactgttttatttactgagttgactttaggccattaggagaggtatccctggttaggcactggttgtggctaaggcaggtgggtagatgtaatacccaatggtgggctgaggtcccagccttgatgaagttggctggaggacctctcaattagatgtgctgaggtttcatcaaggtgaggagtgggagctacctcagctctcctgccaggtcagcaggaaagctactcacctcacagccttattcctgtcccagtgttctggctattcggataagacaggcacctcttttcatctatggaaatgttgatgttccaagtagggaagaattgtgactttgcctctcatgcaggcttgaatctggagtgtgttcctcctgtggggctgcactcaccctggattgttccagaaaggctgtctataggtgcctccattcttctgggggaagcccaactgtgtctgcagtagagtgccaggggaaacaaggaccccttctttaaggtcctacacaatcacaggggatgcctgccgtttggggtagaggtacagactttccctactgtgcccagcactgcaattgtgtctctgctatgagaaacttcccaccactggaaagatttggaactcaaggcctgctgttcacattcttttgtaccatagggtgatcctttgatgtagtgctcgcccccttcccttagaaatgggacatcctgagagctggactgcagtgattgttatttctcttcttagtctaaccacccagcaggactaccaggctccaggctggtgctggcaaatgtctgcaaaaagtcctgtgatatgaccagtcttcaggtctcccagctgtggataccagtacttgctctggtggaggtggcaggggagtgaagtagactctatgagaatccttgggtttaacgtgccggctttctcagatgctggttatgctagcagtgaagtcgtcatgtggacagactcaggacctctggttagccaggatgttacaggcagcagtattagctgttcttttcttcttcctgggatcagggttattctgtcatgagttgcagtaatggcctgagttggtctgcctccagccaggaggtggtgttttcaagaaggcaccagctgcagtagtaacagtgggatttaagcttgcactaaattgtccaagggaggtattctggtttctcaggcaataggtgggtccataaagctctcaagagtttatgtcttctgtgttctgctaccacggcaggtagagaaataccatcaagtgggggcagggatagactctccttgggcgggtcagactctccttgggtagggcttgctgcagccactgtgggggttggggggtgtggttctcaggccagtgaggttaccttccaaaggggattatggctgcctctgctgtgtcatatagtttatcaaggaagtgggggatacctggtagcaaaaggccccacccagctcccacgcagttggcgaggccagtctcactcctgcagtgctctgctaatagagccgagtttccatccaggcagcctgtgcacaatgaactcagacctgccccaggccataggcttccctgctgagaaagcaagcacagctttcaggcctcgcccctacctgtctgcccacagtgttggtagctcctgccctcatatctgcagcagtttccactcaccccccagattctgcttaagaaagttcacgcccagtggcaattattataaaattcagttggaagcttctttcaccccatgacccctccctaattccactggctgccttcctggaggcgctctgtgagatacagttatataccttccctgggctcaagctagagaaactgggagtgcctataaggcttttcccattgctgctactattgtatttcacccagatccctgaatccattccagctctaatttaggttaaatccctctcctgtgatctggattttcagattccctagtggaattcagaggcaggtggttcagaggcagtgggttcagaggcaggttttctctcctctcgcactctaggaactcagtttttcacccgtctctcagaatttgcagtggtgtgccactcctttcaaaggatctgtgaattctttcggtgttcctggtaagttcctatggtggttcttggaacaaaagttcatgatgtgagtctccacacactattctgtctgagcaagtgcaagatgcacattagccctgtctcctatctgccatcttctgcctgtctccttgataataatatttgatttcatgtataaactgcctgaaattccatggtttcatgtagtcaaaaaatgtttttccaaaattaaaagctaaaatcatgtagcaaaatgtaaaaataaaatttaatttgaatgagctgacattttttggaccttcagagaaaaaaagaaattaagcaaacttcctaaaagctgttcatttctttcatcttgtctcatttgctgtttgacccagtgccatctggcatccacattccttgttctcctcacacagtcctctccagagacacaaattaccccctagtcaccagattcttccttgacccttattctgcttggtcttttcatttttgataggaaatgtctgttcagtaaatgaacatttggttttatgatctagttaatgtatgtttttatacttcctaaaaaaacattgtgttaataaataacatataatgctaacaatattatagacagattccattctgctcacaaaaagaataccacattaataaagttatttctgtcctagggaagaccaaggcacatatttgaaaatattcactagagcctgagatcatacttaggactggatgacttgtgggagatggaaggggtagaggaaaaagggcagttcctacatagctgatttcatagggtataatgttttcttacagataccatatgcatgcaagtataacagggttttgggagaacttacctgggagcagcataaatcagaagaagacagcatatgcattttaagatttgagggttttttttaatgtgtataaaaattttgttgatttactattattcctcaagttatgtaccttttatttcccactttcataaccaactcagaaatttctcatccctataggtagcatcactgtccttcctgtcatgatgctcacagcctcaggacaacctttggtcttgctcttatttatcacttaccatctcctgttgaatctgtccattctatccctgtaatccatcatacctctttcttttcctagtgccactactcccagttcagagtcacaaaaggttgtcccttttgatatcacccactcgttcatctactatttattgagtttcttctttatccctttgtcagagaccagggacacaaagatgaatggcttccttgccctcaagtagtcaagtctagtatgacataggcttatcaacaaatattcacagtatatattcctaaaactgttttgaaaaaaagtcactatattatcttcagataatgtgcttttattattcccagctataaatactagaaaagtaagctaaataactagctgtgttttgcctttttctggcttattttacccaaattaacagtgtaagcttagatgtaccttcaaaacctaaacctgcattctctaatttctgtgtcatccttgatgcctagagctgtcattgacaagtgtctgttttagaactaatacacttcaagaacaacattctgctcactgagcagttccattatttgtcatgaaagagctgcacattcagatctgtatttgtatttgtatctgtatatacttcctaaattcagatttaatggtctgactttccttctgatgaacagcagccaacccatcatccccagacaatgaatggaaacagtggttttgtggatcttcttcctaaatctgttgaggaaaggacattttcaaagtaaggagtgagaaggaagatgaattgtttatgggagatcatgatataaaaaccatgttgttctgttttatttctagctacaagaaaacacatgaaaccctgagtcacgcagggcaaaaggcaactgcagctttcagcaacgttggaacggccatcagcaagaagttcggagacatgaggtactgtgggaaaataccatgggaacggcgctaagcccttggctttccgattgaagggagcactagctattagctgctcatctcaacatatgtatttttttattttaatggataaaaatgttatatggctgatatgattgatgactaagataaattttcacactgggacattttctgcctgaaggtcaggcttaggtggcctggtcccagagttgctgtttctactaggacccgacctggtaaaaatagaagatacagggtagtgaggcagatttgaaaagaatgcagcatgtgcaaattcttactagctgtaatataaatgataaattaaaatatgcatttagtggaatgcactcccataaactattctagattgcatatttgtatacatccatctagtatattttttctgtgttaaataggtacatatttatccttttattccataaaggtaccacacatatacacttctggtagttttctttcttcattttctaactattttgtgagtatgttaaatatttattgcaccttcatttttaatgaatttatctcccagtgcgtagctatagcaatgcttttagataagtaaccttgcacattttcattattttcaatatttcactgttacataaaataagggtgaccatcaaggttgattttgacttgagaaccaaaagttctcactggaggcaccaggaaaaaaaaaatgtagtattgcccatagtttttcatattatatacaatattatatacaatatattatataccatattatatagaggtattactcttagtttttgcttatttaaataccagtcatagttttattttgcatttggctgatatgccttggaggatttttctttagaaatcagtttcatttttccctctattctttaaaaacttttcgagcacattttacatttcttctttaaaaaaaaaaaatctctgcgtatttattttactggattcttaaactgttacttttttattaaaaagaaaaagctttgggctgggcacagtggctcatgcctgtaatcccgtcattttgggagactgaggcaggtggatcccttgaggtcaggagttagagaccagcctgaccaacatggtgagaccctgtctccattaaaaaatatatatatatacacaaaaattagccaggcatggttgtgtgtgcctgtagtcccagctgctgaggaggctgaggcaggagaatcacttgaacccaggaggcagaggttgcagtgagcccagatcacgccactgcactccagcctaggcaatagagtgagactctgtctcaaaaaaaaaaaaaaaaaaagaaggaaaagctttgacactgagaggcaaatatcttcctaactttacacttatagatacatctttataaattatattattaaattttatttacttcaaaaattgctggactgtccacaatattcattcactattttaacaactaggcattcacaaggacatgtgcatgaatctgagtacattgttttatcttcatttttactaatgccacaataataaaaagtaattgaaattcttcagaagcaggtgtgataaacaggtaaaccttctggattattaattacccctaattttattacaaataaaatttgtaataattttaacggcgttataacatttatctaaactaattaaataatcctttaaaataggaaaccctctataacctgttatacccaagaaaacatattttcccatgtttataaaattgattctcttcatactgtgttgaaatctttcacttgaaccctgggaactccagcatgacactgctaactagaatagtgcttctgcatctttaggagatcttacaaacacctctgaagcttgtttagaatacatattcttaggttgcacctctcagaggttgtgctcagtaagtctgaggtggagtctaggaatctgcatttataacaagcttccagataatttggcttcagagggtcagtttatgaggaagacagacatagcttagctcacctgtatctggggttttcactaataaaatggagataagaataacaatgtcactggactgttataaaagtagcagaagaaagtctgacatgtattatgcactcaaaaaattgcagttttttatctttaagtgaccagctcagttacaagatggccccacatggtagaaattagggagagtacattaacaggagcccactgtatttcataaaggccctgctcattgtttttcccaatagtgaagaatgaagactgtgtttcacatatgcaatatgttggcattcatattcaaacactaattgggtacaatgtcaaggttgtattgactgcctttcctcccgtttcaatgtggctttgtctagtatagtggatggcctattttccaggacttccaaactttccatttgttattatcccatgtagagggtacaacattttcattataaactgtggctaaaaatattggaaaatacaatctgtgttgctagataatcaaatacaatcctgaaatattttgaagagtttgaaaatttcagagctttatttatataatattttatgtgtatatttctctcaaactatatctaacatttgtatataaatgagaataactctttgtgaaagcaacaagttttacaaagatttttacttttaaattatgcccaaacaagtaatataaataaaagtcattttgaaagtgtttaaacttaataaaagaccttaaatgggaaaaaatagtaagctttgattgtttgttcaaaaactaatgtgccaatttgtaaatatggggaatatgttaaaatttggtcacagaccttttattttaaacttctttttggttaaaagtgtcatattagtctacatttttattagttacactataacatttttgtgcattctggtaacaaatttctgaatgtattcaaaaacattaccagcaaaattcagatagcttggaagaacaacagtacctctcagtttttctttaaaataactccaaattaatatttacagattttgtaaaacctagaatttgggccttttaatagctgaaaaaaaagctttatgttaagatttaatttgtatgttttgtaaaaataagttatatttttctgagctaagtaagattctcattttaacctgattgtcatggaattgcccactctctttctccatccataaaataacattgttaatacccacttaaccaaaatatttcctgtgaagttaaaatgaggtcacacttaggaaagtactcagaagaaatccaagcggttggaatcatttttctaataacattggcatcttctgggaacttctcagttaatttgttcaaactgatccactggggacaaaatgtttggagaaggcatgtcattttattacagtccaatcattgttatatacttataggaataacagaagcaaaacttgagttggtaaaatgatttgtcagagacattaaaaagtcagtgtaatcaagagtggtaaatgaagctaccctgtctgtgctctggggcccttgaaaggggaccaccaagggcagtgcagtgtttctctgcctcctgtttgctaactctgctcctgctcttctctcctgtgcttccgggctgcaggtctcactccatcgggtaagcgccacggggctgcgtgtggggctttccccactcccttgctgcccctttgctttccagggctccctgtttctttcacactgtgcctgaaccaacaaaactacactctgttttccagacagttccagtgaccaggaagatagtttatagggcacttaatacatttgaacttattgaagtacatctctatctcatttctgaatcatttacaccatttcacttgctgagctctctctcaggagtctctttctctgcaccatttcttccggtgttgacagagcttcttagaattgaaaagaagaagaaaaaaaaacaaagtggagattgaaagttatatatgttttctgaaacttctagaaagtaaagttgagaaacaaaaacagattttctctagattgtcatgtttctctgaatttcttgtacccataatttgtgttgatgtttcaccttcaactttctgtgccttctgaagttgaagggaagaaaggtaccggaaaagcacgtacgtatgttaagaagtttgtgatttttaatcccaagcccccgaattaaaacttcttttagccggaatcttattatatacttttatttttttaattttttcctaagaaagcggtctatatttacagagatacaccaattggtaatgcagatgaggctcttttagtgatgcttttgaagtgtaatttctgaggaaatatctgcctaatagtttctaaatcaagtgtctagggtaagaccgtaagtatcccatgaatttgtttgtccttttctttctgtgttctagcaaagtgctacccatactaatgccctcagtggatattatgagggaagggtgacagatttggtccctgaactattagctccttgagagaagagaaagcagggacgctgttgaaaagtgtgaggtgggagcaagcactaggccaggaaaatggacccattgtgctcctccccatgcccagcctgatttctgagtggaactcaatagaaagtaacaggcaaccaaccagagggaagatgaatcagctactaggattaatgggatgagaagtttaaatctcttaaaattctcaggaatgtttgtgtttgtaccagatgttcttgacagtcatctagtacaaatcaatcatcttgacaatcaaaccagaatggatgcagaagtccctatggcctatgagaactgtgtttgcctggcatgtgcttccttgaaagtcttatgttaacttcttgctttcctctggccagtttctctaccatggaatgattagcttctacctgcctggctctatttcctggatactgccttttgctccttactgttttcctgagcagaagggagtagagacctaagttgggcctggagaagatgcccatgggctactgggctcacctgggagaaaccagacattctcagatttcctggcaaaaggaggctgcagaaagtaaaataatatgcaaccacggatccaccatctacttttcatttatacccttgaaagctgactatacccattatacccaacaaaaacaaatgtcatcttggttagatgggcagggaatatttcagatatttggaattgctgttttagaactacgaatagggagtttttcatgtacttatgtgtgctctcttcttttttcttttttcccctttaatctgcttttgctctgaagttactccattcgccattccataagtatgcctgctatgaggtaatgtgtgtaaaatattttatgtaatattaatatgaaatgtgtttaaggtgttattttatttatatttacttatggggttcctctgctttatgtgaaaggaaattgctgatggtcttcaaaagaaaaggctgacaattctgtggaagaattgcgtagcttgggcttttgaccagacatcctggcttaaatctagtctttcctgtgtgatccaagacaagtgacttaacctcaattcttttatccatatattgcaagaaataagacctacttcatatggtgtttgtgaggcataaacaaaggaacctacataaagcatttagcacagtgtctgaacatgccaagcaatcttgcaaaggtaaacttgggtttcttatttccgcagaattaaatgctagcctgggggcaagtttaaatgcaaggctaaagttctagagaggatatcattaggatttttaaggtggatattaaggtgagatgtttgttaaataataaaatgtcagtataattactgaccagataaaaactggtgagaaagacattcttaacttcaagtttgcatggcatagtgatgcaatcagataaaattaaactaatagcaagacaggaatgagtgttaaattgaaaatcagaaaatgcaggctctagcccagctctgccaaggattaactttgcactcttgggaaaatcacctcaatggtatcagcttcatcatatttaaaataagaggctagaaccagattagctgcttgtcaaagatgcccctccacccaccgagccctaaggctgcctagagatgaagcctttgggatcttcccccacttcagtcagagctatgcctcttctacctgctttatattgatgttgttgtttgaaggcattatagaaggagtttagttactttcaatagtttgagaccgccgaagccaaattcttcatatatataatcttttcctctgttttttaactgtcatgaagagaaattcttcctagggtcatttgcagtgctaaaaaagtttgtacatctgattaaatcttattaaagttgtacatctgattaaatctgattaaagagcttctccctgttctccagcatgtattctagtataatttaattagataaatgtctgttctattatattttatgaaggaaggctcttctacactggggttatgtggttaattggttgatttggaaattcaccctcagtatttagttctctgtatttggtggtaaacagagagtacagattcaagattgcttaattcatctttgaatggcttgctctccctagaataagaatgccccagttgggtagtggaacctaaggctctgttcccctttacttgtcaaattttaaatctgggtgtcagaagaaggctagtaaaaattaacatggttttcccctgtgaaccaggaattcatctagtagtggctaatgggtcaaatgtagtctgcatgagcttgcccgaaactaacttaaaaaaaaattattttgcttgtctaacatatacccatgaaccatttcctcactgtgggcctgtgtaactgatggatgacaggcagtcatgtgtgcaggcttggccaaataaaacctgcaatggaaatgaagtgccaataactatatactttttgagtcatgcaagtataattttactaacatttcatcatgaaacagcattacggaggatcactcataggaatttgactcgtgtttgagtcgtacacaaaatgtgatgccatgtcagggccctctgaattcaccattgttaatctgtacagcctgaatgcaggtacatttctgaccatgtggaacaccaaggactcaggagacaatccccaaattcactcataaacatctatgttcattgccttttagtagtataaaagtgatacttcattctgcaccacataatgaaacctatattctatagctgttctcctttataaagtttttctaggccattcctcttattttacttttttttttttgcactcaagagagaataacaagtgccttattaattcaacatttagttgaattatttgatctgaaaatgatggcagttgttgctgctgaaagctgacatggatacaagatttaaaatacacttagttcagttcctgtttctttagtaggagttggtggtatttttaatggtggtgatgtcattaaattataatatcatggggccaaatccaatacagaaaaccagaaagcaccaaatgaagtttttagtgcttaaagcaacaaaattatgtatagattatttaatacaatgaatgagtcacaaataaaatgccattaggggccaggcacggtggctcacgcctgtaatcccagcacttttggaggccgaggcaggtggaccacctgaggtcagaattcgagaccagcctggccaacatggtgaaaccccatctctactaaaaattcaaaaaaaatagctggatgtggtggtgggcacctgcagtcccagctactcaggaggctgaggcaggagaattgcttgaacctgggaggcagaggttgcagtgagtcaagatcagttcactgtattccagcctgggtgacagaacgagactatcaaaaaaaagaaaaaaaaagccattaggctgcaaaggttctatttggtaagagaacaagtaggtatatctatttgagaggaaaaataacgcatgctaataacctccattttgattgggcattaggtaggtaatgggtatgtttcatcttaaaataatgaaagcattaactttccaaaacaccacttcatgtaagttgtcaaaatgattatttttttaaggcatggaaaagaaaaaatatatgaacatttttttccttgcactatttctgaattgtctcacatttgctgaaataaataactttaaaaaatgccaagtggcaaaactcaaacatgacattcatcatatggattttccattgcttactaaaaaacctgagtcaggaagaggagtgttgtgatagaaacaataaatgctaaatgaaaacttaagctacccattgctccactggctcattggaaatgatttacagtgtaccatggaattattacagttgtgtcattgccaaataccatattatttactgtattgtgtactgatcattttacctagaaaaattccatgtcaggttatggtttctgaacctaacctaacagaagtgacatacattttaaaacgtggttggtgcaggtggcaagctgacaggtagctctgtggcagaggccgtgtttacagatatgagcagaaaaccaaacagcatggttgctaagacagctaggcctttggagctgacctctctctttttgttattttaggaattctcctactttcaaatcatttgaggagagggttgagacaactgtcacaagcctcaaggtacagatgaagtgaattctgtgtgagtgggtccattgactcaggacagcttagccattgctgcggttagtttaaagtcgaggcagggccaagaaggcaggcttgcatcaagtcagaccttttctttcacatataaatctatgaataaaaccactattgaatagtgttactatatccttagagttgtttgtataaaccattcaggggtgaattgttcattaaagtgaattggggtatgcgtttaccacttaatctcttaatgctatccctccaaaagtagatatgtgagagatgactgtggataggataaaggctatatgaattctgaatttagagtgtgagtgaaagttcaataacagctcagagctgctctggtttggacatggaccagcaaaaacaaactggggactacgtatccactacccgtcagctacctagacttgtttataaattcaggtactgagcacagcacagtatggctatcatagagggaaaattaaactgagtcacaaaatgcattttataataacacagtaatgcatttcatccctgggtataaattgaaaatgtgcctattacagagtgttttaaaaattcactggaattattgttctagcataggtaagtttgaataaaaagagtaaaatgaaatcagtctagtcttaaaattgaacttttaaaacaagaaaaatcattacaactactaagattatttttaaaggtatcacttaatgacttaattacatcttgctatcattatctctattttgtatacaatccatttctgtattttaccataactgggaaaattaagaatatacgtgatctttaaccagatcaaaaaccttcatatcccatgctgattattcagctgcctctgaatcctgtatcttcacgctgctctcacgtgtgctgcctgataagtatatgtgaggttgtaagttattccttactcgcggttccaggtgctcttgtggattttgacctggagagtcttttcttagggcagggtctttcacatggtctacttctactttattagacccataattaggtgtttaaggcccaggaatgaaattattactcagcatttaccatgccttcatcagtttcattcaccagaagtttccagttgtgcagtttcaccgctctgcatgccaacatcatcgcttattgagcgtacaggaaccaatgggagccgttaaacagccccatgagtaggaaaatttttttaaagggaagagcatccaatgttgtgaacatttgatcttcttgctagaagatcaaaatgaaaggctcaaaaatcccaggattcagtttctaaacatttggttttcagccttagacgacccaatgaggatgggttccattgcttgttagacaagttctgacaaaggacaagttgtactttttaggttttctttagaagaaggagatatgaagaagcaaaagaagaataaagaacaacccattttcatttgcttttaggaaactctggtaagctcatggctcacataggatttaagtgtttgatccacatgttcagcttctcacttttctcacctcacttggatagaaggtatagcctgccgtctccttcagacatgcacataactaacccagcccactagatactagcctttgtgaagacctcctgaaagtgattctatgcttgtatgactgttcatggtttaacaagactcacatgccacatacttcctatttcatggccaaagcctaattcctctttttctgtccacacaggcaatgcagaatagctgataattatgctttgtgtcaaacctcccacttcctaaataattacaaatttctctgtccttttttttcccactagactaaataatagatatgtataacccttttttatatagcttattttctgcagtttacttttgtgttctaagtcttctccaaaatgtctatattgttcattagttaaggatccttagactgttttctgctgagggaatgactcatgagtcggtaaagatgagtggaatttcttgcaggtctatgtgctgcatttccattcacatgccctgctttcaatttgatttttgaaaacactgctgataagaaatcatagtcatatttatgtcctgtgagaaaataaggttctgctataaaggtccactcctgccatcttctcacacaatctgtcatgtaccatgtggcacttgtaccaaatccatgggtctttctttacaccaaattctgtagtttgtttttccatgaaacacttttccaatcctataaaatttagttctgcctacgcccttacaatgtattacttgacactgcagctgatgtcacctgtacagtcactgagcatgcttcctatttcatccaaaacaaacaagtaaatgcagaacgaactcctgtgaagccacttttggtatcttctgccatctcccaatgagtcatgagtaactacatctcttccaaccattttgcatccatgtcaagcagaccatatttttagtgcacctactttttgataaatacattatatggcctggaccaaaaccttaaaaagaaaaggggggcaagttgcattacatgttttgtttctttttgtattatgagagattaggaagcccaactcagcgattcaaatgaaattctatgcaaagaacgattataatttgggggacaaagtgacaaatacttggatgaaaaacaattatgtagagaagggtccaggagaattttatcattcacatctttgcttaaggaggtccttacctaagatattgcagtaggcagtcattaaacctacgtggttaggaatatctttgattccataccttctttgccaaattgatttcttacaaagccattccttctttattttactactctgtttagaggaaatcaagaaacaggagagaataatgaaacaaagcacagaagaaaacgtcagtgatttgtattcactgaattcaatattgtgtgttacttctattgcaaaagagaatgtgaatggaagaaaaaagaggagagagggaactattaatagagtagattacattgaattaatcttatttgtttctctcagggaagaaataagcatagtgaaaaatcacacaatggaaaccatcccttcccctgacctgttcccagtgttaagataacagagggaaggaagatcaatgctctgccagaggtccacaaactaagctgaccactttcttttgaatggtacataagctgagaatggctttacattttttaatggttgaaaaaatcaaaataaaaataatatttcgtgacatttgaaaattaaattacataagttcacatttcagtgtccatacattaagtcttactgaaacacagccttggccaggcctggtggctcacgcctgtaatcccagcactttgggaggccgaggcgggcagatcactagaggtcaagagttcgagaccagcctggccaacgtgttgaaaccccatctctactaaaaatacaaaaatttgctgggcataatggtgggtgcctgtaatatcagctacttgggaggatgagacagacagaattgcttgaacccaggaggcagaggttggagtaagccgagattgcaccactgcactccagcctgggccacagagcaagactccgtctcaaaaaaagaaagaaagaagaaaggaagaaaggaagagaaagaaagtgagagagagaaagaaagaaaagaaagaaagaaaaagaaaagagagggagaaagaaaggaaagaaagaaagaagaaagaaagaaagaaagaaagaaagaaagaaagaaagaaagaaagaaagaaaagaaaagaaagaaagaaagaaagaaagaaagaaagaaagaaaagaaaagaaagaaagaaagaaagaaagaaaaggggaaggggaaggggaagggaagccacgctcattcacttaggtattcgctgtggctacttcctacaagaactgatttgagtatctgtgagagcaacaatgtggttcccaagcctaaagtatttactgtctggccctttacaggtagagttttctgacaccaagcagagtacaaaaattcaatttaataaataaatttaagaggcagagagagattttagtgacaattagagcgaagtgtgttttgtaatgatggaactgcttttgaaccctggttacatttttaaaaggtcaggccaggcagcacagacacaatccccagtgttgctgatgtctgtgagtgatcactttggtgacagtgaggcatcaacaatcagtttggcaatagcaacattatttattccatatcttctttttccttcaaagtgttttttctacattatgaaaaacaatgggagggaaggccagtgtgactattaataagacttgcactaagcattttgcatcttgtcaagcagaccatatttttagtgcatctactttttgataaatacattacatggcctggaccaaaaccttaaaaaaaaaaaaaaagggcaagttgcattacatgtttttttttcctttttgtattatgagagattaggaagccagttttaataagggatttttagcagttttaataaggaatttttcaaaatacttagccttatttttaaattgtaagttaattccttcatgtttctatgcttagtcaataacaaatacacaagaaaaaagcctcataaaccatcataactgcattgtaaggaatattcatactgtaagggtgtattaattccatttcacgctgctgtgaagaaatacctgagactgggtaatttataaaggaaagagatttaattgactcacagttccacagggctgagggggcctcaggaaacttacaatcatggcagaaggggaagtaaatatgtccttcttcacatggtggcaggaaggagaagtgctgaacaaaaggaggaaagccccttgtagaagcatcagatcttgtgagaactcactcactatcacgagaacagtatggaggtcaccgcccccatgattcaattacctcctaccaggttcctccttgctaggattatgaggactatgggaactaccattcaagatgagatttgggtgaggacacagccaaaccatatcaaaaggcagttgcctaagatgatgtgaaatcaccagtgattaagacttgatccatcttcaattttcaaagcagaaaccagaaatcattttccattgagccactctgacttttcaaaagacatttgtcagaaatccagtttgccctgctaactcccaagtagaaaaatctaagtttaggtcatgtaaggatgtttatacatttgtacaattggaggaattaataaaaaatctaattccattttgattagatcagttctctgggtgagtggagatagctgttccaagtccatggatccgattatgctcctgaagggattaaaatcttagatacaggagagataaagagagggttgctaaaagtgtgcaaaattaaagtttggaatcctatccgagaacccaagtatgaataatattctagcactctactaaaggaaacaaacttctgtgcattcttttgtctctaaagatagaaagtatttctgaatttgaaagtaatccagcttttggtattcttataaaaacattacaaaaatgatagtaacaactaactgcatttttgtggatctgctcatttcagacgaaagtaggcggtacgaaccctaatggaggcagttttgaggaggtcctcagctccacggcccatgccagtgcccagagcttggcaggaggctcccggcggaccaaggaggaggagctgcagtgctaagtccagccagcgtgcagctgcatccagaaaccggccactacccagcccatctctgcctgtgcttatccagataagaagaccaaaatcccgctgggaaaaacccaggccttgacattgttattcaaatggcccctccagaaagtttaatgatttccatttgtatttgtgttgatgatggaccacttgaccatcacatttcagtattcatagatgactgtcacattttaaaatgttcccacttgagcaggtacacaactggtcataattcctgtctgtgtaattcgatgtatatttttccaaacatgtagctattgtttgctttgatttttgcttggcctcctttatgatgtgcatgtccttgaaggctgaatgaacagtccctttcagttcagcagatcaacaggatggagctcttcatgactgtctccagcaataggatgatttactataaatttcatccaactacttgtgatctctctcacctacatcaattatgtatgttaatttcagcaattaaaagaattgattttaatgactttgaattcttaatttctttgtcttaaaagttgctagttatgattttacagatgcaattttaaatcaacttttagccaggtgcggcggctcacacctgtaatcccaactattttggatgccaaggtgagaggattgcttgaggccaggagttaaagatcagcctgggcaacacagaccctgtctctacaaaaaaagaaaaaaattagccagacatagtgttgcttgcctgtagtcccagctactctagaggctgaggcaggaggattgcatgagcctaggagttcgaaactgcagtgagctatgattgcaccactgcactactccagcctgggtgacagagtgagacactgtctccaaaaatagtaataataagtagtcaacttttactgctaatttggtgaacatgagagaggatatgaaaataaatattacctcagctatcctaggatgttaaaataatctccaattttaaaattctctccaatctacatacagtagtagttagtcagataaaggatatccaaaaaagagatagctagaaaatgggagaagcagagttctgcaacccctttcagtttgtaaattgttcacatgtatgaaaataactggtatttatcaatccactcagatttctgcactaacttttatcttatatatcatatgtatctcttttctttttctaaatgggaacatatatttgttattaggtggcagagatatagccttaagatatatttgtaaaatgcacactgaatagacatccaacctaaaaaaaatcactatttaaaaagcccatataatatatacatatttgttagcatgctaattgttcatgttttgtgtttattaaatagaagtgatatatatgacattttgaagtaaagcacatctgaaaaattctactcaaattaatggagcatgacaatctgtgcaatctgtacacctaactgaaaatcaaggtggttcaggacaacatcatctctgaggcctggaatcttagcagagagaatggggctgtaaacttgaccagagtggacaaatgtagacaaagaaagctcactagcagggatgctggcattctcccttacttgtgcttccagcctgttggttgaagtagaggcaggaaaccaaccctgcccagctggttctcaggccgtgctggctcgcccaccacagcacacaagtactcagtctctgtgcccaatctatagctgcctgttgagtgtgaagtggctaacttgtgaaaactccctgccaccttctttttttaccatattcagcacaccgcattgtattagataaagttatggtactttaaacaaatatctccgttcaccaaccaatttctgcacaccatagtctcagccttataatctgaaaacacaatattagaattggatagaaaaacaatcaagaaaacttgtggtaatatcttaaagcttccaacacattttagctatttattttattccattcatcaaaattctgatttcattagtttggtaagaatcttatgcacatcatctctattcatctaaaagcttttcattattcactctgacctagaagtgatattcataatggccatggcataagtagcattttttatttttgtcataaaatgtgtgtgaataactcagattagataaatcaaacacttgttggtaggtgggcagtcttacctagtttaggcagtgagcctactcttagcttcaggagcatcactaagagctgcctggtcctccctcaccatgggtgtgcaagatcatcctgatgggactgattgctgagcttctcaattacatctagtgaggctcagttcacaagcagtagtttaaagtgtttcacaagtcctaaaaagtaattgcacacaatggacataaccttttactaacaaaccaaaatgacttcaggtcaacaccatgtgtgtatgaaaggatacctccacagaaaatgtacagttgacccttgaacaacaggagtttgaactgtgagggtccacttatgtgcagattttcttctgcctctggcaccccttgaaacagtgataccaacctctccccttctgcagcctactcaacatgaagacaatgaggataaagacctttatcatcatctgcttccacttaatgaatagtacatatattatctctgttgtttttcttttaacattttgtttccagagcttactttattgtaagaataccacatgtaatgcatataacataaaaatatgtgttaattggccatttatgttatcaacaaggcttatggtcaacagtagctgttggtagttaggtttagggggtgtccaaagttagaatcagatttttgttttatttatttatttatttttttgagactgagtctcaccctgttgcccaggttggagtgcagtggtgcaatcttggctcactgcaacctctgcctcctgggttcaagcaattctctgcctcagcctcccgagtagctgggattacaggcacctaccaccacgcctggctaatttttgtatttttagtagagacaggattttaccatcttggccaggctggtcttgaactcctgaccttgtgatccacctgccctggcctcccaaagtgttgggattacaggcgtgagccacaactcccaacctagaatcggatttttgactgtgcaggcctaatccccgagtggctcaggcgtcaattctttcaattatcaaaaattctgatgcaattgtgattacaaaacaaactagcttttaaaaaaagtaagccattctgaaatttaacgatttaccacattttaaacacagttgctatgatgaacatatttgtaaatttacagtgctactttatctcacaactcacatcacataaagattacaactattggctgggcatggtggctcatgcctgtaatcccagaactttgggaggccaaggtgggtggatcaactgaggtcaggagttcgagaccagcctggccaacacggtgaaaccccgtctttactaaaaatgcaaaaattagctgtgcttgatggcacatccctgtaatcccagctacttgggaggctgaggtgggagaatctctcgaaccagggaggcagaggctgcagtgagccgagatcttgccactgccttccagcctgggtgacagagagatgagaccctgtctcaaaaaaagattacaactattggcaggtcattttagcaatgcaatctgcatatcttactctaaattacacattttgttagaaatctgttcttgaaccatagcaaacagaacaaagtgcatgctttaggatgtgtcttcatgatatgccatgccgttcacagtggccagtgtagagggaacccagggatctacacggctcttctgtcactgttcattgttccaaaattacgtgtaagctttaaagttgttcaacatcaaccccatcgtcctcctctcacttagtattcaatttgagtggaagtagtgtgataaaggaagatggtggtaaggttgaaaagtgacttaatatgaaatgtgaaacaacttcttcaaacctagcattcaaatgtaatttcaaactataacaatatttggcaaaatcttatggctacttttgataacttctaagcatggtaaaattctttatgctacatttctgcttgactttcagttcacaccagagggtatattcatgtacacacacattatatatataatatatataatacatatccatccatcatatatatatataaattaaagcaaaccaaaaatgacaaaatcatgtctttcacagaaatcatcccatttcacctttgaatgtgaagactgacaaattgcttaaatgaaaatgctgagtacagagatgcttttttttacaaagcgcttcatcagtcatttcccccagagcatgtatcaccaccacaaggctttgaggtggatcaacatttttcaaatacaagggcattgagaattatgtaatagctggtaaaataccaatccataaggggaaaacagtgtagggaaaatggctgtgctttagtcaggagtaagctgaggtggtgttgcaaaactgaatggccttagacatactaactgctgcccaaggaggcacctgtatccttttaggaacacgatgttgtacctttatccctgacaattggcagaacataacagcagttctgcaaggggtctcatgggaaattaagttggttgagagccttattgatggccccctgcagagacggtgggcatccctggtctctggcctatgctgggccctaaaagtcataactagtatagctgggatcctagtagtgagctgtcgctctctgtattgttgtgggttatggatccagggctctgccctatgggcatgtatccctacctgaaagacttcccttggcctagggggtagagtgtaaggtaaatcgttgtgctttagtcaggagtacgccaaggtggccttctggtgcaccatgactcagagggtttggagtgcaggcacacaactgtgcacattatgtaaccccgccacatgaggcacattgtgaccactcacatgagcttgtgcttggcttgcagccactattgtctgtaaaaggtacaactacccagctgatgctgtacatatagctcacatccagagaaagaacaaagccatgtcaaaaccgcctgtgattccttgagtgtttttccagctacccaccacctgcccaccgtctcctctcggacctcagcttgggctagaatctgacaattggtgctgtaagcaggatcatgaggtgagtgagcctttggtccctgctgattccaggtcggccatgtggccagaacatgggctgtggtacccagtggcagctgtactgctcggatgggctctggtggaaacccgggcagtggtagatgggtcatgcttcagtgcacagacaaggcactgaagcagctggaagcacagagcaccaacaaggagagagccttcgagggctgggtctgttgtcttagctggagatccccactcagtctgataccgtggaggaaggacccctgttgtgggcttgctcagtggcctgtcggaaggtaaatcatgaacagccattggggccccaagggtgggctcagggacacccctcccccagctccaggtagctctcttctttgttaaccgtgcaacggttttgtcatttgagctaatggggcacaaatgccccccaatatcccaggaagcccacccgagtggtaacacaacacaattcatatatttcctataccccaactgagttgcaggaattaggcaagtagtgccgccagtgtccaggggaacccctgcccaactgcatgcttcatttgtgggatgagggagcagacagtatccctgttctgcctctgggatggaaaagctggcctccatcatgactcccctccctccttcagtggttgcaagtaagcaggtggctagtggcagggcaaggttaccacaccctgattgagtggctttgggcagccatatggactgtgtgaaatgacattggtgaaataactgaaactgtgagtaaatggcagtcatatgctgatttggtgcaagtcatctgggcgatggttatatggcaggctatgtttgacctgaatacccgggggccaggtgatgaatgtttacctctgcacccccgagcacctttggcttcctagctgctgtcctcaccctgtaggtagggcaccgcatacatgaagtgaccactgctatagcagctctcggggaagcagaaggccatcggtgggactgaggggtccacaccataaagaagaggaaggtgccctgcccacagggggctcccgcatgggcaaaaagggggccccaatgagtgacacactcacagatgtgggtagatttgattttgtccagggttgactgagagaaaatcaataaactgcccaatgaagtattcttaactttgtggagacacttgtctccagagaagcaattctggaaaataccaaggggaagaaggacattgctgcgtgacccattcccgcccaggtgctccaactcaaggactacttgctgcagccaggctgaaatgtagagccttttctgtttgattagggaactggccaatgtgcccagcttggggggacaccagatgaccagtggccacatgtagaattagcaattcactggtcccccactaacgtacagcgggtgtcagtgctggtagatattggcacagattgtagccttgtgtatgagaatcagataagtttctgggcaaggctgttacatttatgtttatggaggctggttactgaaagtgaaacctgtgtctctgtacctcggcattggccacttggctccctgtttatatactgtgtatgtctcccccatacctgaatacatcctggtggtggacattttacatggcctggcgttacaaactacggccagggaattcagactcctagtgcatctggtgaagctggtgctgcaaggacataggcatcacaagcctcaggtcctgtcacaaccccaactggttacttccacccatcaataccatttgctgggtgggcatatgaagataactgagacaatttaaaagctggaggaggtgcagatagtgtgtggcatccacagctcctacaattctccagtgtggccagttagaaagcttgatggaactaggcggatgacggtaaactatcaggaactgaataaagtaacacccgctttgagtgcagctgtaccgtcaatcatggatttgatggactgcttgacaatggaactgggacagtaccactatgtggtggacttggtcaatgcatttttctccatcgacattgctccaagagccaggaacagtttgccttcacgtgacaagggcaacaatggacttttacaatgtggccgcagcgctatgtgcatagccccaccatatgtcatggtcttgttgtcatggatttagccacttggcaatgtgcagaaggggtccacctattccattatattgatgatatgttaacctctgattctcttgtagatttagatgtggcggtgcctctcttgcagcaacatttggcagcatgcagttgggccatcaatgaatccaaggtccaagggtctggattatctgccaaattattggaagtttcctgtctaggtaagatgatggccataccagaggctattattgacaaaattcaggcatagccctggcccaccacggtgaagcagctacaaacttttgtgggcttcctgggatactggggggcatttctgccccatttagctcaaatgacaaaactgttgcacggttaacaaagaagagagctacctggaattgggatatggctgagaccgctttcctggcagccaagtgggctattcagcaggcacaagccctatgggtagttggccaggggcacctgtttgagctggatgtgcatgtgagcacagatggtttcagttggggcctgtggcagcatacagagtgcctgagaacactagtaggcttttggtcttaactgtggaaaggagctgagctccaacagtccttgatagagaaacagctagcagctgtatatgcagcatttcagtcttgtgaaagtgtgacaggatgggctacagtcatcatgtggatggcttacccaatagtgggatggatgtgttcatggataatgcccccctggactgggatggcacagacatctactttggcaaagtggggcacctacttggagcagcaaagtttgctgagtacaagacccttggcagcagaattgcaagaggtcttgggacctatagtcctaatgcaagagaaggctatagggcctggggcacccctagaccccaagccatcaccgtttaaggaagggtaccccccattcctgatggggcatggtacacagatgggtctagccaaggatctaatgctgcctggaccgctgttgcagtccaacctagtacagacaccatatggtttgaaaccaggtgtgggcaaagtagccaatgggctgaacttacagcagtatagatggtgatcactaaggagcagatatctatggtgatttgtaccgatagctgggcagcctaccgaggcttaaccttgtggttaactacttggaaaatacaaaattggctagtcagccactgacctatgtcatggagccaagtgatgtggcaagacctctgggaaatggatcatcagaaagatgtaattatttatcatgtgtcaggccatatgcctttggccacctttggcaatgatgaggcagatgtcttggccaaggtccaatggttagtcggcaccaacacaagatgtggccttctggctacaccagaaactgggacatgccaggggcaaactgatgtaacagggcaataagtgttggggtctgtccctgcccatgcaaggtatttgggaggctcgtcagaaatgcccagtatgtgcttggtcataccctaaatggaggcagctgcccacttttacacaagtgacaacagggcgagtgatcttgaccaggtggtaagtagactacatcggtccgctgccaaaattgcaagggtatacacatgtgctaacagctgtggacatggccacaagcctgttgtacatctacccttgcagggtggccaaccaacagcacatcctccgggtcctgcaacacttatgtgccctgtatggttgccctctggccatagagagtgatagagcacccatttcactggacaacaggtacaacaatgtgcacaacaaatggacataaagtggggattccatgtgccatacaacccacaagctgtgggtatgattgagcaatataaagggctcttgaagaatgggttacacttgcatgtcacacccgtctttgcagtgctggagttccaagctggacctggtggttcaaaccttgaatgaacagccatggaaagaccgcccagccctggtggaggctttattacactgggccaccacccctattcagttgcagatacacactaaggatgacctcctccgaccaggtatggggacgaacggtaaccttttgttgcttgccccaatgcccctgaagggaggggaacagaaaacctggctctggccatggaccctccaggctccccactgctggtggttggccgttgtagctccctgtggggaagacctacagtatgacttgcatgtcactccttgggcgttcaatacatgtcacccttggttgattgttcttagggcaacagccagggaagaaacgctcctctgggggacataagtactgtctgtgtggcctattatgagcttccccttgactttggcatagataccggacccataggaaccatggggagctgagaaggtgtggtaccatcgcccagggcagaagctcttggcagctgcattgttatccatggatgaaaagttagcctgtattttgcctgagggacgtcacttacctctgttagtagctgtgcctgctctgtcattttggccataggttaacatgctccaactgcattgtaaactgcgcccacacctgtgctgaggtgatcaatgtttccaactttcgggtctgcactgcccttccagcagcagctgcagatgacttgccttggcatatacattcagtgtctacagagaactggacatggctggagacttggggtcccgtggttgacatctggaatgcaacgcagcaagctttggacaaaggacgctgcaagatccatggtgctcccatcatgtggctggcccatagcatttatgatggctggggctggctagcgggggaacatgtagtacccccagcccaggtgtcgcagagcatagagcaacactggggtaacaccactgtgggataggtacccatcacagcctgtgtaaacataacacatgtcaccatactgaaggtatgctggaacaagcagcccccaagtttgggccccaagggactttgtgccccctgggagtttatgggtctgtgggcacacagggtggccttacctaccagtgaactggacggaatg

SEQ ID NO: 2525 - DNA, 1228 bp, Homo sapiens
actggaaggggcggaggtaaccagaagcggctagtggcggctgcctgcgtccccaaccccctccgcgcagcgctcgcgacacgcgtgccaggagtgggagcgagcggcggggccagctgcgttctgagcctgggcgcagctgccatctgctctgggaagcaccagggtgtccccgccgccctcagctcgaagtcagccaccatggaggcgcaggcacaaggtttgttggagactgaaccgttgcaaggaacagacgaagatgcagtagccagtgctgacttctctagcatgctctctgaggaggaaaaggaagagttaaaagcagagttagttcagctagaagacgaaattacaacactacgacaagttttgtcagcgaaagaaaggcatctagttgagataaaacaaaaactcggcatgaacctgatgaatgaattaaaacagaacttcagcaaaagctggcatgacatgcagactaccactgcctacaagaaaacacatgaaaccctgagtcacgcagggcaaaaggcaactgcagctttcagcaacgttggaacggccatcagcaagaagttcggagacatgagacgaaagtaggcggtacgaaccctaatggaggcagttttgaggaggtcctcagctccacggcccatgccagtgcccagagcttggcaggaggctcccggcggaccaaggaggaggagctgcagtgctaagtccagccagcgtgcagctgcatccagaaaccggccactacccagcccatctctgcctgtgcttatccagataagaagaccaaaatcccgctgggaaaaacccaggccttgacattgttattcaaatggcccctccagaaagtttaatgatttccatttgtatttgtgttgatgatggaccacttgaccatcacatttcagtattcatagatgactgtcacattttaaaatgttcccacttgagcaggtacacaactggtcataattcctgtctgtgtaattcgatgtatatttttccaaacatgtagctattgtttgctttgatttttgcttggcctcctttatgatgtgcatgtccttgaaggctgaatgaacagtccctttcagttcagcagatcaacaggatggagctcttcatgactgtctccagcaataggatgatttactataaatttcatccaactacttgtgatctctctcacctacatcaattatgtatgttaatttcagca

SEQ ID NO: 2526 - protein, 70 aa, Homo sapiens
NPESRRAKGNCSFQQRWNGHQQEVRRHETKVGGTNPNGGSFEEVLSSTAHASAQSLAGGSRRTKEEELQC

SEQ ID NO: 2527 - DNA, 1346 bp, Homo sapiens
actggaaggggcggaggtaaccagaagcggctagtggcggctgcctgcgtccccaaccccctccgcgcagcgctcgcgacacgcgtgccaggagtgggagcgagcggcggggccagctgcgttctgagcctgggcgcagctgccatctgctctgggaagcaccagggtgtccccgccgccctcagctcgaagtcagccaccatggaggcgcaggcacaaggtttgttggagactgaaccgttgcaaggaacagacgaagatgcagtagccagtgctgacttctctagcatgctctctgaggaggaaaaggaagagttaaaagcagagttagttcagctagaagacgaaattacaacactacgacaagttttgtcagcgaaagaaaggcatctagttgagataaaacaaaaactcggcatgaacctgatgaatgaattaaaacagaacttcagcaaaagctggcatgacatgcagactaccactgcctacaagaaaacacatgaaaccctgagtcacgcagggcaaaaggcaactgcagctttcagcaacgttggaacggccatcagcaagaagttcggagacatgagttactccattcgccattccataagtatgcctgctatgaggaattctcctactttcaaatcatttgaggagagggttgagacaactgtcacaagcctcaagacgaaagtaggcggtacgaaccctaatggaggcagttttgaggaggtcctcagctccacggcccatgccagtgcccagagcttggcaggaggctcccggcggaccaaggaggaggagctgcagtgctaagtccagccagcgtgcagctgcatccagaaaccggccactacccagcccatctctgcctgtgcttatccagataagaagaccaaaatcccgctgggaaaaacccaggccttgacattgttattcaaatggcccctccagaaagtttaatgatttccatttgtatttgtgttgatgatggaccacttgaccatcacatttcagtattcatagatgactgtcacattttaaaatgttcccacttgagcaggtacacaactggtcataattcctgtctgtgtaattcgatgtatatttttccaaacatgtagctattgtttgctttgatttttgcttggcctcctttatgatgtgcatgtccttgaaggctgaatgaacagtccctttcagttcagcagatcaacaggatggagctcttcatgactgtctccagcaataggatgatttactataaatttcatccaactacttgtgatctctctcacctacatcaattatgtatgttaatttcagcaattaaaagaattgatttt

SEQ ID NO: 2528 - protein, 204 aa, Homo sapiens
MEAQAQGLLETEPLQGTDEDAVASADFSSMLSEEEKEELKAELVQLEDEITTLRQVLSAKERHLVEIKQKLGMNLMNELKQNFSKSWHDMQTTTAYKKTHETLSHAGQKATAAFSNVGTAISKKFGDMSYSIRHSISMPAMRNSPTFKSFEERVETTVTSLKTKVGGTNPNGGSFEEVLSSTAHASAQSLAGGSRRTKEEELQC

SEQ ID NO: 2529 - DNA, 1279 bp, Homo sapiens
cccttggtgtgtgcataaggccacatgacctcaggtcaggaataaaagcttagggctgagcagctcactctttggttgagaatccagttggctcccctggagtgaagttctacacagaccctggaggaaccaccccatctgtttgttggagactgaaccgttgcaaggaacagacgaagatgcagtagccagtgctgacttctctagcatgctctctgaggaggaaaaggaagagttaaaagcagagttagttcagctagaagacgaaattacaacactacgacaagttttgtcagcgaaagaaaggcatctagttgagataaaacaaaaactcggcatgaacctgatgaatgaattaaaacagaacttcagcaaaagctggcatgacatgcagactaccactgcctacaagaaaacacatgaaaccctgagtcacgcagggcaaaaggcaactgcagctttcagcaacgttggaacggccatcagcaagaagttcggagacatgaggtactctctgaagttactccattcgccattccataagtatgcctgctatgaggaattctcctactttcaaatcatttgaggagagggttgagacaactgtcacaagcctcaagacgaaagtaggcggtacgaaccctaatggaggcagttttgaggaggtcctcagctccacggcccatgccagtgcccagagcttggcaggaggctcccggcggaccaaggaggaggagctgcagtgctaagtccagccagcgtgcagctgcatccagaaaccggccactacccagcccatctctgcctgtgcttatccagataagaagaccaaaatcccgctgggaaaaacccaggccttgacattgttattcaaatggcccctccagaaagtttaatgatttccatttgtatttgtgttgatgatggaccacttgaccatcacatttcagtattcatagatgactgtcacattttaaaatgttcccacttgagcaggtacacaactggtcataattcctgtctgtgtaattcgatgtatatttttccaaacatgtagctattgtttgctttgatttttgcttggcctcctttatgatgtgcatgtccttgaaggctgaatgaacagtccctttcagttcagcagatcaacaggatggagctcttcatgactgtctccagcaataggatgatttactataaatttcatccaactacttgtgatctctctcacctacatcaattatgtatgttaatttcagcaattaaaagaattgatttt

SEQ ID NO: 2530 - protein, 125 aa, Homo sapiens [sequence omitted]

SEQ ID NO: 2531 - DNA, 1289 bp, Homo sapiens
actggaaggggcggaggtaaccagaagcggctagtggcggctgcctgcgtccccaaccccctccgcgcagcgctcgcgacacgcgtgccaggagtgggagcgagcggcggggccagctgcgttctgagcctgggcgcagctgccatctgctctgggaagcaccagggtgtccccgccgccctcagctcgaagtcagccaccatggaggcgcaggcacaaggtttgttggagactgaaccgttgcaaggaacagacgaagatgcagtagccagtgctgacttctctagcatgctctctgaggaggaaaaggaagagttaaaagcagagttagttcagctagaagacgaaattacaacactacgacaagttttgtcagcgaaagaaaggcatctagttgagataaaacaaaaactcggcatgaacctgatgaatgaattaaaacagaacttcagcaaaagctggcatgacatgcagactaccactgcctacaagaaaacacatgaaaccctgagtcacgcagggcaaaaggcaactgcagctttcagcaacgttggaacggccatcagcaagaagttcggagacatgagttactccattcgccattccataagtatgcctgctatgagacgaaagtaggcggtacgaaccctaatggaggcagttttgaggaggtcctcagctccacggcccatgccagtgcccagagcttggcaggaggctcccggcggaccaaggaggaggagctgcagtgctaagtccagccagcgtgcagctgcatccagaaaccggccactacccagcccatctctgcctgtgcttatccagataagaagaccaaaatcccgctgggaaaaacccaggccttgacattgttattcaaatggcccctccagaaagtttaatgatttccatttgtatttgtgttgatgatggaccacttgaccatcacatttcagtattcatagatgactgtcacattttaaaatgttcccacttgagcaggtacacaactggtcataattcctgtctgtgtaattcgatgtatatttttccaaacatgtagctattgtttgctttgatttttgcttggcctcctttatgatgtgcatgtccttgaaggctgaatgaacagtccctttcagttcagcagatcaacaggatggagctcttcatgactgtctccagcaataggatgatttactataaatttcatccaactacttgtgatctctctcacctacatcaattatgtatgttaatttcagcaattaaaagaattgattttaatg

SEQ ID NO: 2532 - protein, 83 aa, Homo sapiens
NPESRRAKGNCSFQQRWNGHQQEVRRHELLHSPFHKYACYETKVGGTNPNGGSFEEVLSSTAHASAQSLAGGSRRTKEEELQC

SEQ ID NO: 2533 - DNA, 74302 bp, Mus musculus
  misc_feature (1)...(74302): n = A, C, G or T/U
ctcgtacgcttctcatctgaggactgcccaaatacactgtctacttttttatttttaacatttaaaatatttctaagagtatttttagagactattaattgacttgagttttaaagtgggaatgggacgtgctgtggtgcagtggaaagaacagtgggttgaaaaatcccgagctccgcattccagagctgaccctgctcatgtgaccttggacagagcaagctggctttcccttggctggttttcttcctctgtttcttgttgtaacagcggcctcttgtggtccatatcattaacaacaaccaccactaccactactacctcaccccccagtcaattttggatttttaaatttattttttatttttggttctttccagtgttatatttcatactgttaagccagcagacttgtgttctcacagataaatcttaggaggcaaaggcaggtgacagcagacaaatgggcaccaaacccatctcttaaactagtctctgtagtttcttccaagcctgacatgaacaaattgcagtttataaaaatgaaaatacttctgtgtctcatccattgctcttcctcctagggaccctgggaaacggcgtgccagggcctcctcgtgccctagcagctcagacctgagcaggaaggaaaccagggcaggtgagtgtgcctctctgccctcagcatcatagcagatgagagtgcctctcctccttcagcatccagagcaggtgagagtgcctctcctccttcagcatccagagcaggtgagtgtgcctctccgccttcagcatccagagcaggtgagtgtgcctctccgccttcagcatccttcattctcaagatctttgtgctgttaaacagtgtgacttgtttttcaaagacaaatgttaggtggaagtcaaggagagtctagagtgccacaccgagcccttagtaactctgttcgacaacttcaggaactggatccaacttgctcagaaaccatttgttttctaagttttcatttttcactgccgtcttaaaccagtatccaggtctgctgccttcaatgtagacagaaactcacagaaattatagcttgaaggtatctggagggtttgtgtgcagatttaatatcagtgtaaatctaaacttaagttcaaaagcattgcccacttaaatgaagaaggttttaattcttcaagattttttgttttttgtttttgtctttaaaataaagaaaaagatacaaatgtggcacattgttaacattggaccaaactagtcagggtaggacagctgtctgttacattaaatgaaactatattatgaaagccctttagggactttattctgcctgaggaaatatgaaataatacagaccaatggttagaaatggtgcaaagtcaggcagtgagaaaaatgagccagggaacatttgttacactataccactgtaacattgtaacactgtaacattgtaacactgtaacattgtaacattgactgtacaacacaagcagcaggtgaaaccttaagttgtggaaacaagagttagggagctctgtgtcacacctagaaaaacaaacatgctgtcacccccatttcaaaggctggtgacccccccccccatggggaaggatctagataaggcaggcataagaaggttttaagccttcaaggtttttgttgttgttgttgtctttaaaataaaaagatacaaacgtagcacattattagcattgaaccaaactattcagggtaggacagtgtctgttatattcttcatagtttttttttttcatttcacacaaaagtttatgtcgggctctatgagtacacatctataatctgaacattttggaaacagagacagggttatgaattgcaggccattctgagctacagtaagaccttgtctcaacaaaaataaaaaatgatgataaatgatatcaatctagcaccgtgtaaaagatgttatcttcaaactagcccctcaccagtaaggagacagttagtggtcacctgcaatgtatctagaactcaggagaatctaagccttccaattccctagacaacattgttgctaaggggtttacgtttgcatgctaaaaacaccagccaatgctaacaatgtatcaagctgttgggtccaaagctgaaagctgtggttaacagctataaccacggagacagcagaatcttcaaaaacaggcagtatttcttgcctgacttacccaattttcctgttgaatcattatttttatatttagcaagcagtgaacctagatgaaagtcctttttaaaatttgaagttgttccccaagactgggccacactgtgtgtttgtagacatgcttcagtttctagaattcactggggatagggtatggaatggaggtgatgggggcagtgaggaccacatggggatacagaagcaaggccatagcaagacacaaccacattagtggggattcctgggagacgaccgagaagaaattcttataccacagtgtttagctaacttctcaaaatgagtctgagaagtctcagaagggtctggaggtaactaaacttgggtgatttctgactcatcttgataatcatttcttcctggggggagcatgttgactgatttcactcttcctggggaactagttgatcgctcagctttacattgaaaagcacactgtgtaggggtttcgttttggttttttgttttttttttaagaccacatggatttaaagcctgaatttctagtaatttggggttttgatgtgttagagcaggttcctactccaatagatgatgccacagctcaatgtcagagtctttttctcgaaccctttaccatattttttgagatggtctctcgttggacatggagccacattctggccacactgagctggtcagtgagctcgcaggatctgcctgtttctgctcctctgctctggggttacagcaccatgcctggcttcttttatatgtgctggggatccaagcctgggtcctgaagcttgcagcagcaggtgccttacccaccgagccatctccccaacctgctttctagcaaatttaagtgtttcctatatatgtcaaggaaattgactgttgttgacttaacaacttctggctttttgtttgccttcttcaatactgagtctgttcatatcctttggcctctaagtggattaattacctaggactatgagcggcggtcttcttatactgcgtggctatttgtatttacttttagaattacatgcttgtttgttttgtttgtttaatgtgagtacatggttgctctcttcagacacaccagaagagggcatcggatcccatagcagatgcttgtgagccaccatgtggttgctgggaactgaactcaggacctctggaagagcagtcagggctcttaaccgctgagccatctctccagccccatgtgcatgttttatccagttcaagcacactcaaaaatccaaaaagcagagatgatggtctacagtcttttgtctgccattctgaaaacctcaacatcccaaacgttgaaatagctctagtggcaatggcagatccgaccagagctgtagtgttggcccctctagtgtgagcgttcacgtgttacgctggagggtggtgctccgaagtccctgttgtgaacactgctttcattctgagatccaggcatttctgaagcctgcaccacacctggcccaaaagtttggaaaaggaactctgggcctgcactcaagactaattctgtgctaaagacaattcaattttgttttatgatgaagtcttgctgataggtctgcacagattagccggtcttgctgttttgcctacattgtatccttaccatttaaacacagtttagttgttgagacttccctgtttgcatttggtgctcctgagtgtccccaggttcagcctgccaggcctccattggcagtaagaaggtttgataaaaggcaagcttagactcgcaatagccagtagacattcctgaaaagcagcggtgggtcctgagcattgggaggaaggtgataattgtacagcttccctgattctctcaggagttatcggccctgtgtggggaaaggttcgtatttggaggcttggagattaatttcagacaccgctgagttcaaatagattttttaaacacatgctattgtgcgttatacactgacttctcttcagcttatacagacaagggagaagagttcactggatttttaaaagacttatttttaattatttgtatgtgtgtatatctgtgcgggggtatgtgtatgcgcaattgccaagaagacacaatgaataaatcaaaagttgtgaaaaacataagtgaatttaaagatgattgtgtgtgtagaatctcttcattgctcctatgatttttcaatatttcatatacgtttttgtggtaccaggcaaggggctcaggaggcagacgttagaggaggaagtctgaagaaggcctgcaagtagcactgccccctccaactcttgagatatgtctgagtaaagtagaatcatgatttgccatcttccctatacaatctgttttctacagtgttgcctttcatattggtttgcagtggaactgaatgataagagcggtggataatttaatagccctagattctgcctggactccactctctccatcttcagaagcacaatgaaacaggagcctgtagtcctgggaggctgagacaggagaatcactctgggttcagggctagcttgggctacatggtgggttctaggacagagtgagaccttgatgtgggggcagggagaggaagaaaggacgcagattgcctctgttctgcctcttgggtgtggtcaatggcagcatcaccacctagagtgtgtgcagcatctggtcttggtggcaccatggcaacacacatcagccattacctatttgcttggtcagggaaaagaggttcacaaaatccttaccattgctagctaggtgtgtggccctcgagcagagctttgcctctatcctgacacctaaatttcacagtcctaaaagcaaatgttctcttctttgctgatgaggaaactggggcctggaaatgtcctaagctcaacagataaaagtcaccctgcatatcaataatagagttggggtggggaaaccaagacattttcctctacctcttgggaaagcactggtcttgctctacttgctccatatcgtgtctatcctaaaagggctaagatttttattaaggatttttagcttttaatctttatatatgtgtctgtatatataggtatgtgtgtgaatatatgtatacacacacacacacacacacacatatatatatatactacatatgtatatacacacatatgtatgtatacacacacacacacacacacacgtgtgtgtgtgtgtgtgtgtatagctgtctattgtatgttacagagagaagtttttaagtaaagaaacaactcaaagcagtttgctggtttcccatggccagcagccttttcaaagctctctgctctatgaagccctccaaccccgcctataagttctggctctttgaaataactcatcctagtttcacttggggtggtttcttgggcctgggggcaaagcgagactggattctgtgttcattttagtgatgcacaggaaaggcttttgcatgtgccctgttccaagtccctctctcaatgccttttccttctctgcatttctttgcagcctccagagctagctcacaggaacaggagacagacacagaagtagatgaagtcttctggaaagcacggattgttcccattttgcatgaattagaaaacggtaaaacaacagttcttgttttaaataaaagcttggcatttatttgcgtgctccccactaccctgatattttcagttgtattttgaatgttatcgctggggatatgttggaaaacaaagaatgttttgggtttacttaccctgtagatgtgtatagtaaatagtatataaaccaaattattaataaatacaattacacttggactagcactccaaagggtcacaatgaggcattgctatgagggtatagggctcttctgagagaactttacccttttttttttttttcagaattcatctggactcttggtcagaaccacagagtaagccccgtaattagtaccatgtgcacagtgggccatcatgcacatagtgggcccttagtaggactcttagacacatgagcagcatggcagaactggctgatgctccactagatgcaggggagaagcatccttacagccagcaagtagggagctgatgcaggacacctgcttcctgagtgcccagtgcttgccatctcagttccatgctgtagccaggctgtgcccactgggtgggccttcgagatggtgctctccatgggtgggtcttctgggcaggatttctgggcttgatgctaatagccgatgcacagcacttcatgtaaactctgtactcaaagatggatgaaatcaaattacctccgaatcccttacattcaaagaatataacatttccccactggagttacagttcctaccctcctattagcttgtacggtgaattttgggtcattccttcaggcaatgagtgcaaatcaaatcaggaaggtgagtctggccaagagttagaaatcacatgggaagtcttcagatgggaggcctgtctggaggggagatcccgcacagcaggctcttcagtggatgcccagtgctctgtccaccagataccaacagggcaaacctaggacatcactaaggagtttgggggaatgagatatagatgagtctcccttctcagatggatcattaaacagtgagctgtaaaccctcccacttgggcagctgtgagttcaaggccagtctaagttccacagtaagagcctgtgtcaaagaaatatcgaatctttgttcctagacaaatagttccctcgataccttgtggttctttaggcctgttcagtagttaatagattgattacaatagttacagtagttaatagttttcagatgcccagcacttaggctctaccacattgccttgttgtcccccactccgtgttcctctttctctgcccacttgcacattgcttttttttctttctttctagaactttttgagaacacattgttaacatattcagggccagcctctactacacaatgagattctgtctcaaaatgaaacaaaataaaaacaaacggaaaaacccaaatctattactctttaactacttcagtccctgattttgttagttttagaagcaagggtgttcacttccgtatctgggaattaccataccaggccgtacaaatcttgcctgcatttggcttattgtccctatgatttcctttctagaaacttctgggccacaagtttcaatcatctgtcacaaccctttcatgatcctgttagaagtggggaaacaggccatttaccgtacagaacatccacacatcaggttttccaagtgttttctcctactgagacccaaattgggcctttgaggcaggactatctccacactcacgctgcatctttctcaggccccctggcagtaggcccactgctgacctatcccttactggaagcgtgattttgggccatttgggtcaggtggtgcctgccaggcgcttggctgcatttccctgtgtggttaaggggtgacttggaagttacttggtgactttgctccgctagatcactcttgaaactcttaactagtttcagctcttataatgtcttctgtggccatgtgcctttctgttttgttttgctttgacttcttgagtctccagatgtagcccaggctgaccttaaacttgccatccttctgcctcggcttccagagtgcagtgctccacctggtggcatttataactggaatagccagctgactgatacagagtatcagagggcttcctggagccagagctgaagctttgatccttgaaccttccttgcctcttcctttgtaaacttgagcccagcagctgagaacagcccaaagcctgcaggcgtgaaggccagtcagagaagaatagagcaacaccccaaagcaatgcaccccgtagagctccggctctcctcgggttggggtctccatcacttcccaactgttcatttacttaagtgcataaccgagaggctttggcgtgtatttagttgttgaggtttcaactttttttttcttagatgttattgttgaaaagagctaaaaatggcccgagtcacttcctttttgctggcgcacacttcctgcatgtccgcagctaagctcccattatggtatttacagattggcctacaacgtctacattttgtgatgaggtccgtcagaggtaacccttccaaagagaacacgctataccttgaattcctttctcccccttgtgctgccctctgagagagggctttctttcctgtgtaccaactgttaagccactctcaaaaatcactttcttcaggatcacaactgtaaacaaaatattctagcctccctctttcctaagcagcatttgtttaaaagtctcctctttggtaatggtggcttgtactgtctctccccctggttgacagtcattttgaaaggaacatagccaggaggtagtggcttaatcccagcacgtgagaggcagaagcaagaggggtctctatgtgttcaaggccagcctggtctacagagtgaattccaggacagccagtgctacacagagaaaccctgcaccagaagaagaaggaggaggaggaggaggaggaggaggaggaggaggaaggaggaggnnnnnnnnnnnnnnnnnnnngaggaggaggaggaggagaaggagaaggagaaggagaaggaaaggagaagaaggagaagaagaaaggaggagaaggagaaggaaggagaaggaggaggaggaggaggaggagagaagaagaaagaagaagaaaaggaaagaaagaaagaaaggaaggaaggaagaaaggaagggagaaagagaaagaaagagagagaaagaaagaaaggaaggaaggaagaaagaaactttttttaaatcaatagatgagcttgcttgaagttatgttgtagattactgtactggctagttttgtgtcaacttgacacagctggagttatcacagagaaaggagcttcagttgaggaaatgcctccatgagatccaactgtaaggcattttctcaattagtgatcaagggggaaaggccccttgtggggggaccatctctgggctggtagtcttggttctataagagagcaggctgagcaagccaggggaagcaagccagtaaagaacatccctccatggcctctgcatcagcttctgcttcctgacccgcttgagttccagtcctgacttccttggtgatgaacagcagtatggaagtgtaagccgaataaaccctttcctccccaacttgcttcttggtcatgatgtttgtgcaggaatagaaaccctgactaagacctatatagttttcttgctctaccatacagatgtgtcagtcaggatccctagtcatatagaacattgatccattcatctcacaacacacttattcacatgtgaaaattaaatagcagtacaaggtagcattagttccttttggaatcatgcaactttttttttttttaaagaaacggaggcagaaatgcaaatgacctgccccagtgaaactggacagagcccagggggaggggagagcactcggaaaagggagccaagggagaggttttgaaaggctgtgtcctggtcaagctaagtgaccggttagtaaataagttagcccaggagatgaatcaaagagatgagaatgggcaagtagatgggaggggtacgtggaaaacagcaccgggggatctggagatgtctcgggatacccagggagcttttcctcgcactgcttgcgtctgacatatctgaaaattcaaccttatgagtaagtagtcgatattctctttgctccgacagaagaagacattgaagagatgtgtgcagcctgcacccagctccatcgcacgctggaggaagcgcgcatgctcggaaagaagttcaagcgaagaactgtcctgctgaaggctctgtataagctagtggatgctgactcggacccgctcagcctgaagcttgccaaacttatcctagcagtaagcttgtctttccttctttctagccgactgtcctgcatctgtgccgagccaaataacttgtttgtacatattgcaaaaagatgggaaaatgtgatgtgtttgtttagtctcttggaaaaattaaggcaataagctcgcaccccagcactggactagaaagtatttcccaaggaatacggctgagcacttaggggatacccccacaagcttgcagagtattctggccacattttctgtgtgattttgggtggagacgacacttttacttagctgtcataaccaactgctcattctctgggggggagggggtgactcagtgcaacgcgcctctcacagagtcactttatcctagggctctgactgtggagctgtcccagggagggcccgggctgccagcttgcagccatcttttcacctggagtctggatgtttttgtttcatgatgaatcaaaaaaggagatgagaagaatgaaccacagatctatttaagctttcagtgaaaatattacctcagttattgatggtcttgaacaaattggtggtggtggtggtggtgtgtgtgtgggacagttgaactgaattaggccttctgagttggttgtaaagtagttaaaaatccactcagcgattcgtcctgtcccaaagaatctaagtgaagttaaattctaatgtagagttaagtggcttggggccttcatttttagaaaaagaaaaagtattttaagaatatgagtggttcaccggcatatgtgtgtatgccccatgtatttgccttgtgcccatgggggccaaaagacagcaccagattcccctggaagtggagttacaggtgcctgtgggccaacattcgggtgttggaactgaacctgggtcctctgcaaaagcagccagagtgtctaaccactgagccatctcagtagtgccaggtgggtaccttcttactcgatacagagttgccaggtcagaagggactttccaagccatggccacttccaacttccaactggccacttggatctccagtaacatcccaggggagatcctgttcaaatgtggctttaggatgtggttccatatacattctcaggtcaccatatcataagaactgtggaggacggggctggagagatggctcagcgattccgagcactggatgttcttccaaagatccctggttcaattctcaacgacacaactgcagtgccttcccagaggagctgacactctcacacagacattcgtgcagagcaccagtgtacataagataaaaataaactaattaattagaataaaaggaactgtggcagtaatacaaaccaagactgaagctatacagaggccaaagctctacactgaatctcctcttcttgctattgttttttttttctgcccaccagtttgatattacagtccaaccatttaacagtatttatttaaaaacatgcagtaagcatgtgagttatttggatttcttgaattctttggctccatagagatgttagatagccattttaattttaatcctttttaaaaaaaaaacttgtgaaaatatgtcagtctgtattaagagtgttcaaagagtacagagatactctgcaggagtgcagccatattcaggaagggttaaactctagcagccttggcagagggctaacaaccagatggacatgtcctatgtgccctttgtggttaggtagagtgggaaactggagtgatctcaaacttctttaacttggaaaacaagtaaacaaaaccaaagcatctttttttgttttgctttgtgtttctgttgttttgannnnnnnnnnnnnnnnnnnnnnnnnnnnnnnnnnnnnnnnnnnnnnnnnnnnnnnnnnnnnnnnnnnnnnnnnnnnnnnnnnnnnnnnnnnnnnnnnnnnnnnnnnnnnnnnnnnnnnnnnnnnnnnnnnnnnnnnnnnnnnnnnnnnnnnnnnnnnnnnnnnnnnnnnnnnnnnnnnnnnnnnnnnnnnnnnnnnnnnnnnnnaaaaaaaaaaaaaaaaaaaaaaaaagaaagaaagaaagaaagaaagaaagaaagaaaaaaagaaaagaagagaaaagaaaagaaggaaattcatcccagccttgggaacctctaaacaagacaaccaaagtcccaggatccatcactgaactctagagaagagacagtgaccagccagccagcacctctgtcctccccagtgctggcacagtgctccaagctgttgatgttgttctgatgaaacttggatacttgtgttgttgtttgattttgttgctatttctttttctgcttttcacacaagttgaggtgggagatggagtgaggtgctttgggaccacttattggggtgttttgtcaagtgtagaccataagctacccactgcagtaggaagatgagcaactcagagattttggtctcaagcccatgcagtagagcctgccagcgcactccgccctcgcccagatgtggaaggggctttcaatttgcttcagtcagctcctttgctgggatttaaagccatgttgtcataatcactgtcttaattttaacttcccattttcttttcttcctgagagcagaaggaatccctactctgtcctgtaaatgccctggcaagttattaaaacacaagttgggctggggacttggcattcccagagcaggaggtgggagaccgacagctctgtgggtgggtctaagccccccacccccttcacttcttgctgcagagccaggcgcatgcccaatgggctgcttctcagattgctgtgcccaggcccagagcaggcgcagtaggtgcagatgctccatcatgctccttcctctgcctcgccagccacagacaacatgcccatctttctttctccctcagggaacagctcagcccgtgagcagttaagtgctcggtggtatttgtggctctaacagataactcggatatattcgactatctttttaaaaagttaactgaaagcccaataaagtatatcggaaataactttttaaataggaaaataatgacccctgtgccatcattttcacgcagaagtctttatttgttcagaggagcccattcctacagactggttttcacactgtcgcagagggcacacaatctgaaccagaaattacagatgtttttattttcaaggctaatagcctgagtttgaccacagtatagaaagagggaaccaactcctgcaggttatctaaagagcgctggctttaatcccagcactctaggagcaggggcaggtgaagctctgtaaatccaaggtcctgctgatctacacagtaaggccctgtctccataaaacaaaacaaaacaaacaaaaccaagtcattttctcttctgggatgctcacttcatttgaagagttttgctattctgaactttattagatgtttccccattagtgaccatattttaccactttagataaatgtgcagttaaagtagacccttggtcagccagccactctatttttataaaggaaattgttcttccttattgccttgtgcttaattgacttagatattgctgtgtggtttagaaagtgatttcagctttgaacaatgattatctcaaggtaccagaaatagccccaagaataagcgggacacagtctaaagcactggctttaagttcatttttatacaatggcagaggggcatgtttcctttgcttccgctcctcggtggactcttttctaggtgagtttaatctgaactttggtatccttcatcgattatcagtatattctaaatcagttgctatgtaatgacatactctcttaaaagtaccgaatagtttgacacatcaatgcaaaatgtttcccagtgagagacaaatggtttgttaaagcgttcttacctgaaaggccgccaacattgttttttagtacagctgagttaggtatggtagctgacacaaaaggtggcctaaaccttcctaggttgttcccttagaacgtttctcatgttttaaaccctctgcctgtaccctgagtgtggaggtcttcaaggtgccaggcctttatttcctcctacttagaaacgcaagtgtgttctttctctgcagcttaaagtgagtggaaagaaccttcttaacgtctgcaaactgatatttaaaatcagcaggaacgagaagaacgacaccctgatgcaggaggataacatcctgggtgagtctccaacagtgctgctgggggccgaccctgcaccccagtaaagatgcccaagtccctagaggaaaaggagagcaagtgatggggagcgagatggctccggctctagggcatcagagttgtaatggttgtttttttttctcaaccttccctgttttcccacatttgtttagagtctactgtgaccagctcagttttggttttgctcttttgatgcctgtagtgatgtggtgggacctaatgacatcactgtgtaaaaagtcatttcctaggcccagagttactgttagaataaacacacctgtaaatttttgacgtaatcaaaaattctactctgttgacataacaggaataagctcccccaaaagtgaagaaacagttgtggctattacagaatgcagacatgggcacagtttaatacagagcagcctagctaacaaagcccaattccgaacatgcccctaagtaatttagaagtggacaaaatgacctggtgggaagctctcaggacttgtgctgttcctgcagaagaggctgcaatagaaaacgttgtggtcatttttttttttttggtaacaggggacaatgatcgaagcaaacagggacaaaaccaggcttgaaagaatgtctaacatcatattgcttaactgagaattaccgataaaaaaacaaaaaaacaaagaatctcataaattcattgtttttaatagctgagtagtactccattgtgtaaatgtaccacattttctgtatccattcctctgttgagggacatctgggttcttttcagcttttggctattataaataagactgctatgaacatagtggagcatgtgtccttattacatgttggagcgtcttctgagtatatgcccaggagtggtatagctgagtcctcaggcactactatgtccaattttctgaggaaccaccaaactgatttccagagtaccagcttgcaatgccaccagcaatggaggagtgctcctctttctccatatcctcgccagcatctgctgtcacctgagtttttgatcttagccattctgactggtgtgagatggaatctcagagttgttctgatttacatttccctgatgactaaggatgttgaacatttctttaggtgcttctcagccatttggtattccttggttgagaatttttgtttagctttgtaccccatttttaatagggttatttggttctctggagtctaacttcttgagttctttgtatatattggatattagtcctctatctgatttaggattggtaaagatttttttcccaatcatggattacccaagatacaatttgcaaaacacgtgaaactcaagaagaaggaaaaccaaagtgtgggtacttctgtccttcttagaagggagatcaaaatacccatggaaggagttacagagacaaagttcagagcagagactgaaggaatgatcatctagagactgctccacccccacctgaggatccatcccatttagaaccaccaagcccagacactattgtggatgccagcaagagctgctgataggagcctgatataactgtctcctgagaggctctgccagtgcctgactaatacagaagtgaatgctcacagtcatccattagatggagcacagagtccccaatgaaggagctagagaaagtatccaaggagctgaaggggtttgcagccccataggaggaacaacaatatgaactaaccagtacccccagatttcccagggactaaaccaccaatcaaagagtacacatagtgggactcatggctctagctgcatatgtaacaaaggatggcctagtcgaccatcaatgggaggagaggtctttggtcctgtgaaggttctatgccccagtgtagggaaatgccagggccaggaagcgggagtgggtgggttggggaccagggagaggggatagggggttttcggaggggaaaccaggaaaggggataacatttgaaatgtaaataaagaaaatatctaaaaagaaattttaaaacatatattctaaggcccctttgacactcttatactcgagagtggtgtcttcatctaaccttgctcaaaccatctggaaggctccaaaaacctgttagctctatggcattgggattttgttgttgggattattggtttatttgttgatttggttgcttgtttccagcagtcctgggggttgaacttagggtgtgatgcttgcaagcatgctgtttgttgttgtttggttggttgttgttggttgttggttggttggttggtgtttacagacagggtctcactctgagcatagacagactgggctcagattcagctgtggtccttgcaccttgaactccttaaggctgagagagtatagatgttccccaccatgcttagggagggaggtgggaagggggtgggtgttatattcaaatcgttttcagtggctgagatggtttttaacgtcccatgtcatccacgacccattgggaaagcaacaaatgaagtcttgaagattcagtgaggatgaaactcttccccagtgactgcctttctcattagtattggacagtaacttgacatttttgggcctaactattaaaggcgggtgatgctactcggagctgaggctgtcatcctcacttgcacaggacaacccctgcttctggtcgcatcactgttaatggagatttgctgtcactgagacttcccagcctgagtgacttcaggagcatttgcatgcatccttgaatgaacatattttacaaattgtgtgccagcgtcgagtttgctgttgtacttaggcatttatagaaatgcgtcttttctggcagaatcattactggaggtactgagagctgaagagctgcaaagtaacaccgaggcttttctctactgcatgggggctctgaaattcgtttccggaagcccggggtttcttactgagatggtcaacaagggtgcagtggaaatattggcacagctgataaaggaaatgacggaggacacggagaagcacggcgtctgcctgcctgattctggccatttgctagtgcaggtaggtgctgtgctcgacaaggttagaggggttaaattagctttctgacaccgtttaaagtagcagcagatgagaagcctccgcatccggaggcaggccagggtctcggagatcaagggaagtggcccctggctagtcagtgtgtgtcccgttacaggaggctgtttcatggctttcggcagaaccttccatattgcttgcatagttctgcagagaaagcagggccgaaagccgggcttggcagatgtggagtcccggaactgagaggagcagggggatcaagagttcaaggtccagaggcaggcggatttctgcgttcgaggccagcctggtctacagagtgaatttcaggacagccagggttacacagagaaaccctgtctcaaaaaaccaaaaaaaaaaaaaaaagaaaaaaagaaaaaagaaaaaagaaaaaagaaaaaaaaaaaaaaaaagaagggagggaggcctgagctgagcctcatggcacaggcctgtcattcccagccaatcaggaagctgaggcaggagaattgaaagcaataaaggctccattgtaagacagaaagtaaggagaagactgaagaggtggggccatggtagaaggcatagtttccatcctcagtaaaggggaagagcaacaaagcaatacgcatggaggggcgaagagtctctgagctctgctcatccatgtgtgtgatgctggggatttcccagccagccctaaggccacatctctgtctgcagtgactggagttaatgacatcgggtggagtttttcacaggccctgtggatgccatgcagctctgggaccacggggaggcaggtagtaaacaagcaggtatcattcatctggctacaacaggaagaaaatttttcttctgcttagagttttattagtgctcttgtgacagattaaatttctcagttaaattatttccaccaaaacttccctagctctcatattgctttgtagatgagattttcacccctaatagcatttatacatcaaataatcgcatctttgatgtagtaactcatgggatttgaaatgtgcttgtcaattagtgaggatggattgatcctttggtgtgctcggaggcgtcgggaggacatgttagaaatcagatttacaccctgacttcaagattcttaaaatatttatgatgattattaattttagattttggtcctccattttgaaaggattgtaaaaaaataaaaaaataatctcttttggtcaaagacaaggccagaccatgttttagcaaggggcacttataaagcacttttctttttttatgttgactgaattttgggtcatttgtggggttttgtttttgtttttgaaagtagttatttctgattacacagtgatggtcatttctgttaaaatgtaggcgatataaggaaaagtataaaagctatccgagctaggagtgcggcagcacacacttgtaatactgacatacctgggaggctgaggcagggggatcataaattcaaggccagttcaaacctatctcaaagcaaaacaaaacaaaaaataaagatgtttttatcctgagctatatggacataccttcaacaacatagtctttgtgatatgtattctcaaatgaacctatgtacaccaggctgacctcaaactcaaagagatgtctgcttctagagtgctgggattagaggcatgtattaaagatacacctggctctaatctgcatgtttttcatttatttatgtatgtatttatttatttttatttcatttgcacttgtgttgtgcctgcatgtgtgtctctgtaaagatgtcagctcccctggaactggagtgagagacagttgtgaactgccctgtggggctgggaattgaagctgagtcctctgatagagaagtcagtgctcttaaccactaagccatttcttcagcccctctaatctgtatttttaatagtcagtttgtttcatgtcacctcttctctcttggtttcttcgtgtccattcagacagcttatattgttcacagtatatttaatactttttaataatctcataggttttaaaaatgggacagtaaaaattctcttgccttacctctatcagcttacttttcactgtttcaccgctgtgataaagatatgcccatgtggtgggttgaatgaaagcggtctccataggctcatatgtttgacttcttggtcctcagttggtggaactgtttgggaaggattagaaagtgtggccttgttggaggagatgtgttgctgaggatggctttgaagttttaactctctctccctctctccatctctctctctctccctccctccctccctctccctcttcctccctctctctctccctctctctctctccctctctgcttgctccctgtaggtcaggttgtaaagctctctgctgcttcttcagtgccatgcctgtctgtgtcctgccatgattgtggactaaccctctaaaattgttagcggcccccagttaaatgatttattagagttattaggagttgccctggtcataggttctcttcacaaccgtagaacaacagtaactaagacaacctcaaattctcaaccatgctgatctttgttggatagtgtttgtttgtttgtttcaagacaagatttctatgtgtggctctggctgtcctggaaatcactctgtagaccaagctggtctcaacctctgagatccacctgcctctgccccctgagtgctggaatttgaggcaaagtctctctttgattataattttctctctccatccacccaagtgcagggattacaggcatggacctcagtatctggcccctttttaatgtcacagattgggcattctcgtctagttgaagacatttttccaatctgttatatgtctgtggtaccattttatataataaaaataaaatccattgatataaaggaacatttagtgctatcaggagcaaacatatgtcagatcaagaaatgagggcacggagctggagagatggctcagcagttaagagcactgactgctcttctgaaggtcctgagttcaaatcccaacaaccacatggtggctcgcaaccatccataatgagatctgacacccttttctggagtgtctgaagacagctacagtgtattcacatatgttgggaaaaagaaagaaagaaagaaagaaagaaagaaagaaagaaagaaagaaagaaagaaagaaagaaagaaagaaagggagagagagggagagagagagagaaagaaagagagagagaaagagagagagaaagagagaaagaaagaaagaaagaaagaaagaaagaaagaaagaaagaaagaaagaaagaaagaaaagaaagagaaaggagggcactaggtaggtgtggttgttagggccataatgtcaggtgtttgaagccaaaaattttcaagttcaaggccagtctgagttaaataacaggctgtagtctcaaagaataagcaagccctacttctccctccaacttgaaatcagatccctgctgtgctgtttagctgccccacccccacccccttcctgctttttatttcccttttctgggattagccctagacctactgggtcagcccttccattcaatttcctccaaggggcactgtagagcttcacaccacccaccaccttcacatcacagctggtttggttgtcttcaacacctttctctgaacctagcatctggtagagactctgtggggaccacagtctgcaccccgtatcctatggatctggagaaagtgaaactcactgttgccacttgagagcatgcccctgccgtgcacaccacttgattcgagcaagctatcaccatgtttgagtgtttacaaatatgggtagaaagggagtttgttttacagcgtgtcatttgcagaatccgcaaaactggacagtccttcctatttaattaaaacaaaaatgttgggctggataggccaagactgtaagcccaccatttcagagactaaagtagaagactcctaagttcaaggcctgcccgagctatagacaagacccatgccagaaaagaatgttttaatcagggaaagaaaacagacaagaagctgttctatactgaatgcataataaaatgtaagcaacatggcttcaccccaaaatactgcatatgcaaacacacacacaattgagacctatacccaacatgggaaacagcagaaatactttctcaaagcaacctttgtccatctgctaggatggagagttccttcacacccagtttttaatggcatacaaattgtagtgatttattgttcactgaacgagacagctattcttcacttaggaacttcccttcctgtaaaggaatgctttatccgccagagcaactggccgctaactcacctgacaggagagagcaggcattgcctttctcctctgcctttgcttgggaagaagcagtttcccagtggctgctcagactgcttctccaaggacagcaagtctggagatgtgaggagactcggcggcacccacgatcatataatgccttgggttctgaactatggaagggcggggctcatcaccatggctggaggatgagttttataacaagccttccagtgctgcatacctccccaggcacaggctctgtctgtgcctagagtttcacaaaatactatactgtgacggcagcttactttaacaagaggaaaggagaagcgggaccaggacaggcttggatgaagccaccaatcaggaaggagggttagcgtacacagcagggccaggaagaatatgctaaagatatttcctctgcagccaggaagatccagggcggggaaataaggatccacgcgcactgtttgccgagaaccgcttgcttgccggtatcttagcatgtctgctcagccctgccgcttctccgtactgtgaatatagtcatcgcggcaatgaagaaatgcctctaacttctaacacgcagttgtgaaacccagtgttagaacttcatcacttagtaattttagcctttgacatgatctctggatgacctggaactcctggtgatgctcctgcctctgcctctcccagctactagagttataactgcacaccccgcccattctttgtcagtggtcactaaggcatctctcgcagactccttattttggcacatcaacattctgtgtaatctatacaacctccaagttctctcctgtcttaatggggcatgattattaaattacaaggatggatgggtggtggtggtgcatccctttaattctagtgcttgggaggcagaggcaaatggatcaagggagttcaaggccagctgggtttccaggacagccggggctaaaaattagaaagatcaagtcatacatccatttatcctgaaacaaaaagacatccaggtagtaaatagattcccagtaatgaaaaataggcacaagctagtgttggggtgggggatgggcaggagtccttccggttggggagaaagccatggtaggaaatgctgtaggcagaccccagcaggcttgtgaattagcagcacgttcctatgcgtgtgcgtatgcggactgccatgagatccttgggaaaacttggctctaatgtgttcatgtgtgcagtgacgctgcatgttgttggtgtcttatgtttctgccagactgtattcaccatatgcgagacaacgtgaaacctcttgggttaccacaggggcttggattcaggcacatatgtggtctcagttgggcaaaagtccaaagaatgaatgtacttttactaatagagaaggacaggtttagctgaggttaggaacagtgccactttgacttttcacttgtggggcccccgtctgtggtctctgactgtgttcgtcatttcccagcaccagtgcgaagtgaaccattttgcagttgagataaaacgtgagggacttgagggatggatagcccgcaaccgagaaataaaataaatgtgtttacagacaaatgccaaatagaatggcggagcaggggacaggagttcaaagtctagggctccaggccacctggaggcctgcggacgtcctgcaccccagtttcctcatctcacaaatgagtaacagaaccctgttcttgcctgctccaagggttgtttcaagcagcaaatggggtgagtagtttgtccccccgtggggtggtggcagctcatttgcataacaccttttgctatatcagaggataatcttgctgcgggctgcaggggttgaagaagtgtcgtaatttccagacaccttacttgcagtgtgcccaaaggtttctttgaaagatgctttttagagttgggaaaatggctcccctatggccctgactaagggtcaagttcctggaatgctccattttgcttagtctcaggacctcagggagagttctgagatgggctatttgagccttttttttttttttttttttttaaagacagagcttgtctgtgtagcgctggctgtcctggaactcattatgtagaccaggctggcctggaactcacagaggtccacctgcctctgactcctaagtgttggtattaaaggtgtggaccactactcctaggcccaatatcatcttaatgcagttttctctataaaaatggctttcctagggctgagagtttagtttcttggtagagtgcttgcctagcaactaagggcctcagttcagtccccagcaccaaaatgcaaaataaactaagaatggcctctagatattgattgcatggtaagacatcaagactcacctaattcatgaaggacatgcagctttgccaggctctcagggtatcttatctgacagaggacagctcattggagaagggagcatgatgctccagagcagagctcggtcattgttcagcagataactagccatgaccaagatggacttttctcccttgataaatggaaaaaaaaaaaacaaaaacaaaacaaaacgccagtcctcttcgttccactcaacatgtagcaaaagcgaggacactgaactctgttcaattctcttgtgggctgtcagcacagcttcttttgtcatctttccattggttgctttctgactctgtctctcccgctgccttcccattggttgtttcctgactctgtctcccctgctgcagatagaacagttgcagctcaagggttttttttttactttgtttcttggtgaaatgctgcagttgggagttgtgaatggatggcgcgggcaagccctttagaagctaaataggcaccatctgacctccactgtctttaaagaaaggatttattaggtttgagagattaagagaagtaacagtaactaaggagaactgggaagtagaggaagaggcagggaggcggcaaacatctctcatatgtatgtgtgtatacatatacatgcacatatacatgcacatatacatatctgcacacatatatatgtatatatacacatacatatatgcacacatatatatgtgtatgtgtatatgtatatatgtggttgacatatatgttgatacataattatatatataatagtgtatatgtgtatatatatactatatatataatatacatgtatgtaaaatatatatgtatatatgttgcagagggagagacctaactagggtgctactggcacagagaagaggctctgtctagtcactaagccatccatgaaaagcagtggacctaactgggccctgcatgtgaacaacaggtggcaggagtagttgaggaagacatgctgagtgaaggatgcagtctagagaaagacatgggccagaagacaagcttgttgtctggagggttggggagagggggagacgcagaaagtaatatggacgcatagactgagagagtgagagtctgtagggtgtggatgctcccccttcgtcttgggtgatcaggggaggggaggttttgaaatccccttattgtggttggatcgaaagccaccccattgaaaacctccccacacagaaagatggcagatggtgtctggtgggggtgggggagagctgtagaggttggcaaacgatgacattgtggaaggaacgatggcagccagaggaagtgtggaaggagtggagctttctattgtgtgtgtctgtaccagccttgacttgggctcagtgccaaaaagtcaaacccaggacatgccctccctgaagctcctggcccagagtcgacaggcaggcagagcccactgagagccctcgtgggctctgtcgccggaggcacactttcgagtgattaagaataaccggatcacaagatcatgccattgagtcttaacctgggaaaaatggacacagccaccagggcttcaggtaacaaaaagcagaaaacagggggactctgtgggcctgggcacccaggctatggatgtcacatgttgaatgttactcagaagttttgacatgggtataagcttcatgcatctttctgccagcgccacaattgacacacgtgcaaatgctcaggctagcatgtattactcctctggacatacaatgttctaatgtttgcacctccactcctgctttgggccttttgggggctggaggacaggatttcaccccaggctaactctaacttattatgtaacccttcttaatgccaactcacagtcctcctgcctcagcctccagagtgctgggattacaggtgtgagccattatgcccagccactgattgggtcatttacaaaagtaatatgtttggagcagaagaattataaaacttttaactttttctaatgagaagggataagagagtgggaagggataaattagggtttgaataagaaaaaatagctccagggaaaattgcgacccctttagacggaggttagtgtgggagcaaggtgagactgacattgtcctcccacggcagctggagtacgtgctcctggctcccatgggctccgcctgccctggggacagagggagtcagtctgtcactggttctccagtctcttgggagggaagtgggtgaaccagcatttagatcagtggttctcaccctgagggtcttggccccttgaaggactctttggcaggagctgcctgaggccattggaaaacatagataatgttaccattcataacagtagcaaaattacagttatgaagtagcaatgaaaatgattatggttgggggtcaccacaacatgaggaactgaattaaaaggttacagcatggcctattagtctcacagagacccaggccttagcttagtagatgctcatgagagccaggctcccttgcatcatgtgcaagtagtttatttccctgccaatgtgtgtgatgtcagagctttcaaggaagaacttaggagtcaaccactagtgctttgaacacattcatttaaaaggtttgcaaattttctgggtttcaacatgatcagttgtatgttaatcagttatatttaacttcgttgatacaaaggaaaaactaaccaagggtacctggtatctcattaatttttctgttgtttatttggttggttgtgttctgagagagggtcttctagcccaggcaggcctcatactctttctgtagtgaaggctagccatgatcctcctatctccacctccaaacactgagattcaggtgtgtatggttggcattggttgttttgaaaggtgtgtggtgcccacaacaatgcttgactcttacatagagctctacagcacacataaaccatctctacacctttacaatccatacatcccagcacccaggaagtaaccagaggaagcctgctttgcttcccactgaccacaatataaaggggaaggcacagcgtgagtgactgccctaatcatacttcatggggagattcaactcacgggcccacgcttcctcctctgcacccatgggtgaaactcttcagtgggggtggggccaggcccaccctgtgcagtggataatactgatatccacatatctaatcttatctcccctcagctgccctcacctcacctcagcttccctcagctcaccccccttcccctcagctcacctcacctcagctcaccctgcctcgcctcagctcacctcagctcacctccgctccccacagctcaccctgcctcgcctcagctcacctcgattcatatctcacaatgataagacaaccagtcagtatcaccccaccatgaggaaaatgtactgtgggagggtgagaaaccaagccaggctgggggagtgccagccccaagggcaatgatcacactgaaaaagaaaatcactagacaacaatgaggcagtggtggcgcacgcctttacttccagcactggggaggcagaggcaggccaagctctgtgagttcgaggccagcctggtctacagagtgagttccaggacagccagggctacacagagaaaccctacctcaaaaacaaacaacaaaaaaaaacacaagcaaacaagacaaaattactaaacaacaaagccactgttacaatcttaccaagttgctctcttcttgacccttagaccaaagctctaagaagaaagctctcttgaaaaaactgttaacaaaatatgacaactttgtaagaagttgtatctccctctttgaatgaaatgagactaaaagtcttacatagctacttcttacacgcgttctcgcgaccggccaggaaagacgcagcaaaccagaatcttctgcggcaaaactttattgcttacatcttcaggagcaagagtgtaagcctcaaaccccccattgcttacatctttaggagccagagcgccagagcgcagagcaagagctctattgtttacatctttaggagcaagagagcaagcccaaagcccaaagcgaaagcgaaaccccctccctcttaaggagagttatccttcgcctaggacgtatcactccctgattggctgcagcccatggccgagttgtagtcacggggaaggcagagtacatggggtggagaaatacccttggcacatgcgcagattatttgtttaccacttagaacacagctgtcagcgccatcttgtgacggcgaatgtgggggcggcttcccacagctactggcttcctcattattcagtgctacttagaagaatttaagtgggcaaagccagaagcaggggccaggcctgtactcccagactggggaggtcaaggcagaaggagcagaagataagatcagccacggctacataacaagcttgaggccagcctgggctagacaggatcctgtctcaaaacaatagtcacaacaaacaaagaatctaggggttggtgagatggctcagtgggtaaaagcgcttgccaccaagctgggtagccagatctgagctctggagttcacgtgatggaaacagagatctgactcccacaagttgttctgtgagttccatatgactgctatagcatatgggtactctccccccacgcacacacgatttctctcttaataaaataataaaacttgaaaaaattaaagtgggaaggttctcatgtgtgttactgtgtttatgacaagctcagtcaacgatgagggtttcactaactctgagggtctggtaaattatttacctaaaatgttaatattccatctacatactttgtgtgggttcatttgagacagtccctttgtagctcaggctggccttgaactcctaactgtttcctctcgacttccttattctgggattgcaggcatatgtcactacacccagcagcctccactctttccatttgatttaggcttctttgttcttgtctctcttctgggcacagacccttcccccttccttgcagtggagaggagggcagggaggggtctcctagccctgctgccttattttaagctttaagaaaatgacacgcacacacgttctcctagacaaccgcgaccttgagaaacttagtcgattcaccactgacgagaagcaagctcctgaacatgggggcctttccccatctctgcacagtgatggaacagcatgcagacgacaaggacatctgtaccaacatcgccagaatctttaggtaggtagactaagaaaatacctcattttaaaatgtttagtttttgtatccttggtgtaaatcgcctccctcagatcgacctgtgggcatgtctgcgggcattttcttgattagtaagaggtggccccacccactctcttggataggtgggcctggcttataggaaaagaggcagagccagctataaatacaggctaaaggttctcagtctgcctcagttcctgctcccagcttcctctctcagtgtgtgacctgacttcccttccttccctcagtgaaggggacagtaatgcggaaacataaccggaataaaccctttcctaaggcgtgttgttcttaggtttttttttttttcacacaaagaatttaaattagttttaatttaatatgttgagatagttttactcccatagtccaggctggccttgaactccttcctggcaatcctgcctcaggctcccaagtgttgtctgagccatcatgactagctcccatctttattacgttgcttgggactcttaatgaaaaactggtgagtgagcactagctatcttcttctaactttaaagattatcgcgtggttttgccagctgaaaataattagtataggctgccctccctaccctttggacacaagatctcaaagcccagatcatgctggcctctaactcacagagacctaggtttctccctcggcctcctgagagctaggatttcttgtggtaaactattatgaattgttggatttagttaactaatatatttccgatttttctgaccggtaagtgacttacttacattgaccttgcctttttctttgccatattatttttgtgttttcagtttcaagtatatagtgtcatcataaaatgagtgggaaaatgtaatctaagtgtgtggataatggctacagatttaattagttaacaatcccttctctccctctatctccccatgcccacttcccacccccaccctggagttagtctcattgtatggccaaggcagagcccagactgctgagctcagatggccctccttccgctgcctactgagtagccaaggctccaggtaccagccaccatggctagctgattcgtttgtttagtggctgtgtatactgtctgggttcccactccgcttagcttcagtccatttgattcttatgagatttcatctttccccctaatgctttcaaacaacattacatggttccaaccaagctttcagggggctgaggcagaaagatcaagagtccagcttggagtacatagtaaaaccctgtttccaaaaataaatcaatatggcatgacagtaactctgtagtagaatgcttgcctaccttgtgagaggccctaggttccatttctagtacttcaatcaaccaatgttgattttaatcagttttgtctccaatgatacagttttatttattttacttatttgcaaatacttgtactgtacttagtgtgggctgggcaatcatctacgtaccaaccaaatgggtgccttcactgtcatcttcatctgacatagggggaaactgaggcacaggggaaatgcagacattttcccagcatcacactcagtaggctgcagagctgcgggtcaagccaggcattctgactccagagctcacactttttcttcccatgttatgtggcccttcttgttgttaagattgcctttcatgtttgatttgatttttaataactttttaaacttccttgatcaatcttgccaaaggtttgacagtcttttaaaaaaatattttcttttatgaatacttataagtgcttgtatgtatgtgtacatgtgtaccatgtgcatgcatgcatacgtgtgccctcagaggtccgttagaggctgcttcatcgactggagctggagtcataggctgagtcaccatgtgggtgctggcaactaagcctgggtcctctgccagagcagccagtgctctcaactgctgagccatctcaccagtcccccagtcattaggtttcagcaaagaatcaatagatgtatcaataaaattgatgcatgtttcctatcttactcttcctgcttctcctgactaactcctctttactgtctgtgaagatgctatgttttgcttctacctgttttagttagaaattcatcttctttttgatcttgttaaggctattcattttcctctaaatgccactttaactgtatcctatgaattgtaatttgcagtatttgtttgtattcagacgtgtctctagattttctaggtgacttgaaatggaagtttcatatttttaaaagttttacagtatgtgggaaatacattcgtatcttttaagctggcagtgtggctcatcccaggcggaagcaggaaaatcaagagttcaaggtcatcctcagctacataggaagtctgcgaccagcctgtgctacatgcaactccgtttcaaagaaaaaacaggcttgtgagatggcttggtagataaagccacttgtcaccaaatctaacaacctgagttcaagtctgaggatctaaaggttgaggaaagagtcaattccaaactcacacgcctgcctggattgtacaggctagtttccaagttcccaggctcaacggccctgtaattcttagacccccaagtgctgccattgtagttgggcaccagccatggcctgctgcatggtgaccaaagaaggctgtctggagggtgtcaagtgctgtgaagagatggtgaaactctcaacaggacagtagtcacgtgtgcctgtccacctgtcactcatgaaaggttcctgtttgtcatgagcttttcagtattagctttggggtttgctcgctgctcatgaaacactttcaacactgcctgttctaagggctattttggctgatgttagtttttatgcctgcttctgatggggtggttatccaaacaaatactgcagcaatttctgagtttccgttttgtacatcccatctagcttttttgtcaacttgacacaaatctagagtcagtcgtctggaaagagggaacattaatagagggattacctccatacgattgcctatagacaagtctgtgagacattttctcgatgagcgattgatggtagatggcccagcccactgcggggcggggagggatgtgtgccattgctaggcagctggttctgggctgtataagatgacaaactgagcacgccacagccaaacaagctagcgagcagtgttcctctgtggtcttcgctttagtttctgccttggcttccctttgagatggactgtacgctataaggtcacagcttttatcagcagcagaaagcaaaggaggacagcactctgccatcttcagggttctgccttctgggaagcaaacacagggcctcaagcctgctagccaagtgtttactaccaaggagggggctttagaaacgcccgcccttgctctgtccccttagagtccagagcagatagcaagcctctttgcagtttctctggatttctggacttcttttcctgaatttgcatgatctgcattttacagtgatactaggtgcacttaaattttaaaaattgtagcatttgttctgattctcccacttggcatttcccacagcaaactaacctcttaccgcgactgctgtgcagccctggccagctattccaggtgttacgccttgtttctgagtctattgaacaaataccagaagaaccaggtgagtcatgcatgcctctgtttggtgtcctcagtgtctgtgcactggtgggcttgtagacaccgatgttgagcgagtttatctttttaatgctttggttccttctagaagctcccttccattcctggtataatggccagagggggcagtgaacacctgcaaggattgaaaagagaataatcagaggcggaaacagggtcctaggggaggctcctgatttaggggtacactgcaggagttctgttcttcctgggatttacaggctgcctacatgagttttcctggggtgggcatgaggtacactggcaacttcagtagaaacccccactgaacttcacctcaggtttatggagtcagaggggcatagtgtggcctgtctatctgcattttaacaagaaccatggggatttgacatgcaagcaaaaaaaatcatctacatgagatatactttgaagattcttttagcctttaaattcactaattctttgatcatgtattttagactatgggatttcaagttaaagtatttgaagaattatctctctactatcatctatatatttatatatgtatatacctatctatttatctctctgtataatatatatgtgcctgagtatctttctgtgtatcacatacaggcagggaccccaaaggtattggatcccctggaactggagttacagacagttgtgatctgcctgatttggggtcctgggaactgaacctgggtcctctgcaaaagcagcaagtgcccttaactactgagccacccctcccaccctcaggataaagtatttatgaaatgacgtagctttaatggatcagaaagaaatgtgtaatatgttgtttatatagtaaaattatatatatatatttgtatatatatatacatacatatatatgtgtgtgtatatatatgtgtgtgtatatatatatgcatacacacacacacacatatacagacacacattggcatatgtgtggagatgagaggacaactgtatcagttggatctctctttctaccacataggacccagggattgaagtcagatcaagtttggcagtttaaatggaactgaatctaatttttctaggccagtacttctgctgaaaatgtctacatttgtctgcttacgttattttagccatgtattattgttcttttagtggtggagaaatttctgtcattcccttaccttagcaaggtaagaccttgctaaaagtcctggtaacttatgttaaaaacggacctacaatgagagcgatagggtgaaatctaaggagacaggaaaccaatggcagaggcacacagaaccttgctgtgtagcccaggctggcctagaactccatatataacccaggtgacctgtccttgaggtgcacctgcctcagctccccaagtgtgtatcaccatgcacagcactgcatgtgtatctccatgcacagcactgcatgtgtatcaccatgcacagcactgcatgagtcttcccctgagtacctaggccacagaggccttcacgtgggtgctttgtgttttctacactccctatcctttaaacttggagactttctcaggtcagacagcacatggacttgcttaatctgctttcaggtgttcaccatgggctcttcacttgtccgtcaagcatcgcctaatttaggttttgtaaactaaactttatctttgtaatctaaccataatctttggacagtgaattaacccgaggataaaccttgctttcttggatattttcttcatctgccttggggagggctgtgttttgggggagggagacatgtgccccctgcatgtgcctgtggaggaggaggtcaaagtggtgttctttcttgctgtccatctcacgttctgaggcggggcttttnnnnnnnnnnnnnnnnnnnnaatcgccgttctgaggcggggcttttgaagaacctggagctcactgattggcaaccagcctgaagctcactgattggccaggctggttgccagcagggcaccaccccagccaccctgtgctgggatgactgactagtgcgtcacctcatgcagctgtttatggggtgctgggaacatgaactcaggtcctcattcttgcacagaaagcattttatctagctcctaagccccaggagtttctttttaaacagaaagggcctggggagatggctccaaagagagagtgcttgttatataagctccagacctggatctgactctagcacctacacaaagccagtgagcatggtagccccctggagtggtacctggcaggcacagatgaggaatgcctagggtaaatctggttacggagactggattagtgacctctgcgttcaagtgagagagcctgtctcagtatcagttggagagtgactggggaagatggtggatgttactctagtcaagtacatctgcacacacgtgtaaacatgcataaacaccacgagcacggtcacacacacacatacacaaaacaacacacaaagcacatataccatatacacatactcacacatagcacaaacacatacatatgcacacaccatacacactcatacatgacacaaatacacatcacacttacacacacacagatacacacacatcacaaatacagtcacacataccacatgcataccacacacacaaacaaacatacacactacaaacacacaccatccacacatccacacacacacacacatacacaccacacacataaaagcatctcaactaaaggtaaaggacactgaacactgagttgtctctgtttgtggcctacctgatggccctggtgtctattttgcctgtgctagagacttgcgatgtcaccctggcctgtgcgcttactttgatttaaaggacaagatgtcctaacatttagctgacgtaaagtcgggcaggctttttgcgaggctttgcagtggctgtcacctgtacgacagagctgttgtcagaagccacatgcctctctcggctcactgtatagtgtcgcactcctgttaagatcatttgacttcccaagaagatcatcttgcaaacagaaccatcaaagaaatgctgaatgtattccttaattactgtggtgaaaatcatattcaaatgtattgcccatgtcctttgcatcttagatgtttgaaagcacctagcctgtcctcagtgacctgccattattctaagtgtccgctgtgcccaaggaggcctgcatcccaccccaggatggcatcttaaccacctgcgtcttctgtaggtttcctcttagtctctgcctctgcctttaataatcccacccgccctcttgtgatcgtgtgcttgaagttagccgaggactctcatagtcacactgagtaaaagtagctttaataatgaaatattaaataaacttgtcagtctagcacactcctcttgtctcagtacttgcaggagaatcaggagtctgagactaggctggactttgtgaaatcctgtctcaaactcaaaagcaaaacaaactataaaatagcaggctctttgattcagagtagagcgctgtgaatatcaaaatggccacaaagaccagtcgtgtggatggggtccgttgttgatgttgtttactaggccggctaggataggttagggttttactgctctgaacagacgccatgaccaaggcagctcttataaggacaacatttaattggggctggcttataggttcagagattcagtccattgtcatcaaagtgggagcatggcagcatctaggcaggcatggtacaggcagagctgagcgttctacatcttcatctgaaggtctattggagaagactgtttttcaggcagctaggataagggtctcaaagcccaccctcacagtgacacactttctccaacaaggcctcctaacagtgccactcaggaccatgtagggccaagcatattcaaaccaccacaccagccaagcacagagatgagatatcagagagggcataaaggccttccatcactgctgaagtcagccttgggcagtctcctggagatggtcttcaggatggtgcttcaggatggagctaagggcctccatgaaagacccacaagcccaagagccaagctggagctgcaggaaactgaatgatactataagcaaacatacaagcctgacttggagaaagatattgtttgtaaaatgtctggccactccaaggatagctgcagcactggctgtgaactgactgaccagggctcccaggagctctcacaccgagtaaagcagaaaggaagcaatgctctccagtagatcagcatcaccacctagtagaccatgtgccacctcgtgtacactttggggtacacaaagctacagccttccccacacactagagaacatagagatggggacaggggcagagatttaggtaatgccttcctgagcctggtccatgctgttcagaaccaggccctggtttttgctgtacagctccaggaaggacaaagaagggcttatgagaaggtcctcaatagaactgtggtttcctgtagaaaggcagacatgttgaaaacagtctgaattcaggaggaacaatgacatgaccctgaactccattcagcaagaagtccaggtgacaacaggaaacactgttgtacctatgtgccaggtgacaacaggaaacacattgtacctatgtggagcaaacagctgaagtgtgacatagccggaccccagaaatgacactgctcatgcccccactaacagagctctgagcccttccctgtgaagatgacattaaagctgcagacctattgctctccaccctcccccccccccccccgagtatcccatggctttctcttcatccccttcctcaagccagagaactgacatccccagagttaaaagtgaaaatccacggtgtgctgtgcttccctgcttgcgtgttatctgtgagtgaactgttcttacctcaggaaatggaaaagtacttaaagctcaccgataagatacaagatggagaaagcattgctccacggtaccctcaggcattaggagagtggccagtgttttaataggctgctgactatctgatcgaagcctagacattgtgaagttgcacattagcatgtagatgtctagatgggatctcttcaagagttatggttccattaccttgtaaactgctcctggtgtatttcagttactttttaaaaggcagcttctaaaagaatgcatttaatttgggctcacatttcagggagttagagagcccatcatggcagcttgagggtataatgccacaccttctccaacaatgccacacctcctaatccttcccaaacagttcttccaactgggggccaagtattaaaactcatccaaactactacagcatctgacccccaaatcttattctgattttcttgtttttatttttttatttttatttttgagataggatcttgtataacccaggctggccttgaatttactatgtagccaagggtggctctgaattcctggttctcttatttcaactcctgagtgctgggactagaagtgtgtactatcctgtctggcactaatgtccttttaaatgcttataaatgctcagctctttgattgcccctagaaagaactttattatcacattggcttcctcattagtgagataaatagtgtgcggttggggcagggtttgagacacaaagctcaggcccgccttcagcttgagaggctgccagggtgaccttgaactcctgattcttctgcctccacctcttaagtgctgagatgacaggcgagcccctgccatactccactgagagaaataaattttaaattgtcgattttatcttacgtttttaaacttttcaaaaagcacctgtggggctggatcaatggctcagtcagtagttaagagtacttgtttttgcagaggacccaggtttgattcccagcacccatgtggtggctcacagccatctgtaactccaggcccaggagatccaatgcctcatctgacctcttcagacattaggcacatttatagtgatgtatgtgtgagcctactaatatatatatatataataaaacaaaataaaataaatgtaaaaatgaagtttaagtttttccaagtaccccttattatgtcttttatttaactattgcagtgttgtgcttttgagttatcatttttattcccaagtaagaaaaatagctaatttattctttcctcaaagccaaaacatttgagaagaatagggagttggtcaaactaccaggaagtgattaagcatctcaaatacttcctcaagtcattaaccaaagctcccgtaagtcctggacagtctcttgatggtcgtcccaatgctgtcatttatgcagctgtcttccccactgcagtgagcttcccctgcccccactccggggcacaggccatgatgtggggtgatgctcacacgggagggaggcttttgatatggaaagaatgagtttggagtctgtgaactgtttgttataagatcttttcttcctaatattcaagtgccttccttaaatatttgctgttctcttcctggtttggaggacatactagtaagtctcctcctctcttttcatactggtgggctgccatgaagccagcagaacagaaaggagagatttaaaatcacttcagatcagcacaggtccaaattcccaccccgcccccaatataaaagccagtttctagagattctacgccctatccttatatgctttgcggtggtttaaaagtttgtacctctgagttttacctggatttggaggtttagagctgatcttcaaagtagaactcagcccatggcagtttaaggagaattaccactgcccgtgactatttgtggtccagctctatgaactgtttctgcaagattagcttggcagaaatagatttgaaagctttgtagtttcttaatgtacatacctaacggcgagtgcttagccatagggagcagtctgaagtgcctttgctcagggaagttttgtttgtttctaagtcccatcccccaccccgtcccacccaagagccaggaagaggagtgtgtttccaaagactacccagtcaacctcagaaagtactagaaacccagatttcgtatttcaactatggccgtaccatctcgacacatcctgatatgcctaatcttgtctgactcagaagctcagcagagaccattcggatttggatagaagacccttctttctttccaaggacccccagatgattctagattctaattaacactatggttcagggacacagttttgaccttcattgtgatggaacacctatatcacaaacttaaatgaaagaccagataactgagtgagagatttctttctcagtagatactgaaaggacctagtggggaaacccccactcaactcccgattcagcgggcacccaagaatcacaaacaaacagaccatcttgatgtaaatacatgaggaagtttaatggcggagctccaggtcgaaacatatctcaagcaggagacagtggattcgaccatgaggcttggaagctaggggtttttatagaaaggggctggggctgggggaggaattggcgcggtttcacatgattggtccatttgaacatcagcagactgtacatgcagataacatttaacttaggtcagaaggacggggagatagggaggcgccgggccagtccagacatgtcattctctttatctttatggccaagcagcctcaggaatgtcttaatgatgggcctgcccaggcatgtcctggcttgttctgctatgttctcagccccaggtttcaaagctcacaaacaactctttgggctatttgacataaattatatgaatcacaggtctcaagttttattttctttcaacatcaagtacagtatggttcagaagatgaaattttacacaggtcatcgtccttgttacgtgtgctgtgtcaaaacgctgtgaacaatagaaggagtaaaagtgcaaagttgagtactgatgagttctgccctgaaacccagtgtggcagtaagtaccacaaacccgggctagaaagctgggtctgatggctctggcctggactgtaggctgttgtaggaggctgagcaggaggactacaagttttaggacctgcctgtactgtagggcacatgcaacttagtgagaccctatctcaataaagtgtttagaagaggcctgggatggagaggaccaagctgtggcgccctcgcctgctgtgagaaaggcctgggctcagtccccagcaccataaataaaatgcagtaagagcagtgggagaaccctgcattgcaccctgacgtattatcatttttatacagtatttccgtctcatggtgattacatacatgtgtaaacattgctttttctggttgattcataaaacttaaaagcttcttgagctcatagccagtaagtttcgagaaaaatcacaacctcacatgcccgtgtcttagtcaggatctctatgctgtgctgaaacaccatgaccaaaagcagcttggggtaggggaggaagggttgatttcactcccagttctgtagaaaagttcctcaccagaagctgtgtgggcaaggactctcatggaggccacggaggagtgctggcgatggcttgcttcccatgccttgctcagcctgccttcttctgggcttctggattagcagcccagggatggccccacccacagtgggcggggtcttcccccatcaatcactagttaagaaaatgctttacagctgggtcttatggaggcattttctccattggagttctctcagatgactctagcttgtgtcaagatgacataaaactagctagcatacatcattttgaaatttactgtactttttgctaaaaatcctttaaaccctgctgtttgccctgccctttgaagccgagaaagccaacagttgtgtgtgtgtgcattcacagtaattattcagatgactgattaatcggactgccgaaaattttacctctatgtgagacagttaacggtacaaatactccttttatatggtgtagcctttttaaaattagttatcatgctaggaacatttaggaattcatgtgagccaggccacgtctggtagcttgtgtcttttctcaaggagacagaggcaggtggatctctgagtctgaagccagcctggtctagagttccagaacacgcagggctacacagagaaactgtgtctaaaccctgtcttgaaaaacaaaacaaaagagaagacagttaatctggcctactccaaatttgtgaacgcattaactgggaaagggtttctctaaattctgaactgtcttccttacctacaagatggtcctttgtgtgctgtctttgtgtccatgtatgtaaaccacttatcacttaacatttattgacccagaaaaatttgaaactattatgcatataaaaaatcatgttgaggagctggagagctggctcagcgattcagagcactgactgctcctgcagagaccctggctctgtctccagcactcccatggcagctcacgaacgtctgtaactccagtcccagggttgatgccctcttccagcctctgccggcaccggacacacaagtggtgcacagatatgcatgcagccaaaacacccatacacataaaataaagataatttaaaaactagtattgaataaaataaggagtggaccaccagcctgggtctgggggagtaactcagagatcggcacagtgaaaggttctgggttcagttcctagtgtcagacccttcttgtctgtgtctggtttggggtgccctgtctacatgtctgcctctaactggcacctggagtgtattctccgtgacacacacacattttctaatcctctgagagagggctgccctgagtgcccactgtgttctctcagcaacaccaacatggagacgtgtcacccttcacactggggacaacttggctcattgacaagagccgtgttaacgtgacatcacactgccatttataattgtgtgtgtgttttaaatcaatctatcatctctttttctctttctttctctctttttccctccctccctctgtccttctctccctctccctctctctctctctttctccctccctccttccctttccccccactctttctttctctgttggtcacgtggtcttgctatgaaacctaggctatcatggaacccaccaggctggcactgaccaatactattcgtgctgggcttactagtgtgagcctgttgtgattttcaagactgtagattctaaaattgaaacatatacctctagtcctagctctgaggaagctgaggcagggggatcatgagttagatgctagcctgggctacatgagacccccccccaaacaaaacaaaacaaaaaaaaagcttcatactgacaaatgtcacctataccctgccccccctccacacacgcacacacaaagtgatgttatcagggggcagagtgctacacaggaagctgtggccagttacttccacagcacactgagggggaaatcctgtaccggactcactgctgatgggagatgtgaaatatctcttccccatctgctgttgtttttgttaaaggggaaaaaggagagaaattacatgatcgagtacccaaagcaagcatctgacctatcgctgcccttacagctgttaagtgtgactgagcatttagagcaggcttttctgagtgtgctgaaaatgaacaagggggtgggtggccttcacttttaatctctacacatcttgctgtgaggatgacccaggaggaatacgaatttgtgtgtttttgtaaagccatacaataaaaaggacaacagaggtttctcagtttaatcccaggctccacactggaatgaatctctcgggaagctttggggatgcaggttgctgggcctcaccctggctggttctggctgaggtctggggtgggacccgagagtccgtctctaagaaactcctgcccgagcttgtgctgagctgcagctgggagaacctgtaacacaaatgaggtggttccctaagacgcgtccttcagtgtgtatgaagtgactttgagatgaacctccaggggtctcaagtgctaactcaggtcaccatgacgtagggtaagcatgttaaagaagggaacaactgacaagaccagccaagaccagctatgagcttctccagtgaatgttgggctgcctccttgcttttgcttgggcagctgacaatttttgacctgtttgctctctgtctctgtctctatctctgtgtctgtgtttgtgtctctgtctctctctgtgtctctgtctctgtgtctctgtctttctgtctctctgtctctctgtctctgtctctctgtctctctgtctctctctctctctctctctctctctgtgtgtgtgtgtgtgtgtgtgtgtaagtgtgtgcccgtggaggtggaaggggggttggtgtcacattaaacatgtgctctcccactgagctctccctagctacagagacaatttctcagggaaaacaagatgttatgttacgttgtgttagactcttctcccaatgttctctgccagacttttgtcaaaacaagttgtcctgggaccagctgccatccttggcaggcatgcagcaccaatcagagtagcccatgagggaggaatgaggtggggcccttgggaccttcagaaggacctgcccggggggaaatctcatggaccacagttagctagccaagcccccagctcttgatttgttgcatgagacaagcacattaaatgtcattaaaacggtccaatgttcctgtagattttccctttgaaagagcacagatgtgtgtaaatgtgtgtttagccacatctgaacttcgtaagtttgcagcagacatgtttgagagtggtgtgttatttctgttgacaacaaatcttactcccagccctgggtgaagtgagctgagtttgtatgtggtatttctctgggggtgtgggcaggggtgggggtggggctctacagaagttttcagaatagacttccacaggggcaacaagcgagttctcaacttatgtacaagtgctaagacaatctgtagctcaggtctcaatgggcacaaaactgagacagaaaacagttgccatcaactccattcaaagccacactttccagtttaggtaagaattcctatcaagatccaattaaatggtagatctcatttaagcactaggcacatattgtctgctttatggtgtaaattgcatttggtacaaaccaaatgtgcaaacagatgggcttaataagggagaaggagcaagctgtggtgctgaggcagggctagcttctgaggtgcctctgatgtcagcactactacatttagaagcccatcacagtatgtgtgggtttgaattttggaagaacataaagggattttccccatctcttctgtaaatatctactgggcaagaactctggtagaaaatgcctgaaataagacttatgtaaggggcagccttttacaaaggtcacacgaagttcacaaagaacaatccttatctacattagccgccccgtcaccacggatcctcctccgcctctccagctctcccacttttggacagggcagatttctttctttctccttttctaaacagagctactaaatgcggcgggatgacaggcaaagcttggcaagcagggtccggcatcaccagactggcccttcttgtgctgtatttttaaagtcagcctcttgttctgcatagttccactcagacctggagggtgagccacccctccagccaggcatgcagcatgagctctgatttggacagctccgacatcctgttgcaggaagagagagacctggaatggctggagatggggcggcaagcagagcgtcccaccctccccatgtttctaacttgggccaggcatttagccgcgcagagataacccaccctcccttcctcacatcctcttagcaactgtgctggattggttaggaagagccctccacccctttcccctggtgtctttgtgtggcaacttgcttccactggctctctgcctcctccctggcaggagtgtgccctttggctgccttcccagcctctctgcaggcacattcccagcggtgctgggcgagcgagcaggcaggcgagcaagtgagagcatttggctgagtgagctccttgttcagccttgccctcgttctgcacccctgaccgggcaggctcagtgggccgaagcttgctcattctttccagctcccactgtttttgtccttgtggaacgggctcttcccccactcagctcagagcccaaatgcctttatgtctgtgccttaaaaaagaacccatcgcagtaaaagtctaactgttgccctggtgtttttgagggggagccacattcagaggtgtggagtgtgggtactcagtgaataattgctgatagggtggctgggttggcagttggatgggtgggtaggtggtcatctctgccttcagaatggtctgcttaggtctgcagttttgagtctgtggtctctcagattggtctgattatatatatatatatatatatatatatatatatatatgaatgaatgaatatgtattctctcaggctaaccgtcaacccgccgccagtgctgataggataggtaaatcagtattttctcagaagtctgcagcctgcctttggtgacttttattctttagccacctgtaaactcaaatgtttaggttttatttaagggtggaaagtcggataaagcaaactggaaatcctaactcaactctaagatgcaggcagttttagccagtttaaaacagggtgtcttgattaattttctggttaagggcatggggagtgttaaattttcaaccccctttaacttaattcttaaaggtccttctaaaatgttttcctaggctggataggagttgtctcctaagtatgaggagtctgtggaacatagtttattccttctgtgacagcttgacatcagtcctttgcctgtggtcagcatcatgcacggggactattttagggtgccgtgtgagaatcatgtgtccactctggctgcctgtgggtggtaaagcactatcagtcacacggggcagatggctgagttggatgctccttagggtgaggggacaggcagtggatgcttttgagcagaggagattgctctgctcctgagatgaagagattccaagtctcctcctgcagtgcacagaccggccaccaggggcgcctttcacaagagaagtgaggcaaccagtttgagaggttggtgaagggtcaaagatgcccggtgcaggcctttaatcccagtactcagaaggcagaaacaggcagatctctgtgagtttgcagccatacagggctatgtggagagaccctgtcttaaacccccgccccctgaaaaatgcctcaagtctgtgggacattggaggttgagggtagttgggaatgaggtattgaagtgcattagcatgctcagacaggccctgagtgcccctcaccgtgtccttcagtctccagaagcctcagtttccgtacgtcagggtgggggtggcaatctcttgttggctttaggccaatatccctcagatggaagaaggtagctcccatagtagctcctgctgttgctaatgccctggagctggtcacagaccattctgtataacagtgtcctcttctgtgtccttccatagttaaagccatttatttacaacttgtggggcccatgatgtcttagcaaagtgcatgtctgttagggcgtaccatgctgccaggaggaggacatggctggcttcctagaggaaggtcggcttcttacgggagtgtgctgctggtctgtgttctggttggctatagctgctgatcattccattttcagcaaaactaggaagtccgtatgaactggttactctgccttctcagggacgttgaaagcctctccagatcccttttcattttgttatttcaaaaccatgtcattgtgtgagtgtgcaccgatgtgttggtttaaaaaaatattgtgagagtggagtgctgttctcagggactggggaagagtaagagacggagagccatgtgttgaaggaactgcttctatggtgagattgcgggtctgtgaacctggtcatttgtcattcgcgatgtattttgttgggttttttgtttttgtttttttttttgttgttgtttttcgagataaggtttcacttgtagctttggctgtcctggaactcactatgtagagcagactggccccgaactctgagatcctcctgcctctgtctcccaagtgctgggatgaaaggcgagtggcattacacctgactttcttgtgatattctctataagggtttatgggatttgtcttgttagctaagaactactttgtatacttcaggtgggttggtcagggcagcagtagataacctctgtgcagctctggtttggtggtggggggagactcttcagggcaggaatgagagcgcaggccacttaaaatgaggctatggtctcacagagacccttccctagcttccagtctcaggactgtggctgagccacgcaagcgcaggtgcaggaacagccttccacgagactgcttctgttttggcctattttgtgctcctggctccctggaaaacatattttcaagaggtgggaagaaaagacgccacagtcaaaggacagaaacagtgaggggagcaggtggtgggagctgggtgctgcaaacggcgcaatctgtcgtccccgtttgttgatctcgcatgccatccttcagttggcactgctactgccaggaaccaccccctcccttttccatccagcagggagagaggcattgtgacagtattaactcttcctttcctgaagccacttcaaactgaatcttcttcgtcacgccatgacccacatagacgttagaaccaaagatatttagatgtgttaaggacttggggggtgggttagaaaaagcagcccttggtctgcccagatgaagtcacaggctctgggataaacgttcctggaagctgaatagtgagaggtagaggaggcacctgggcccgagaggggagtgaatggcttggtcctgacagtgaccgagcaagaccaacgagctgtttgttagatgcccctgacagcattttagatcacttacgatgtctttgctgtctctttaatgtttccccttagggttgggagagcccctccagggaacactaacacgggatgcgaaacggagtaggaacttgccgtctaggatgagagcaggaaaagctttgttcagatggcaacaatggaagttttcatgttcagtgacttggttcatgtgtgtctattaagcctgtgggcaggttagttctggttttatttttggcaacttgacacaagctagggtcaactagcaagagagaacctcatctgaggcactgcctccctcagactggactgtgggcaagcctgggctgcttttttcttagttgatgattggtgtgggatggcccagcacactgtgggtgggaccactcttgggctgctgttcctgggaggtataagaaaagtggccgaacattagcctgagagcaagtcagtaagcagccctcctccatggcctctgcttcagtccctgcctccaggtcctgccctgactcccctcaccgatagaccgtgaagtggaagtggaagccaaaggaaccctttctttcccaagttgcttttggtcatggttggttatcagagcagagaggggcctgcctagaacactttggacccctgccagcacatctgaaggtccatgtgttggttgcttaagctactgctacggttaatattgatcattacagagagagagcttgtacaacatcagtcagaaggcatatcaaagtttgcagcaattctgctcacagttactgccttggaaaatagaaggcagaattttctatcaaggaactgagttcttgagaatcctgctttcctcttgcccctggcctgggtgttggaggtctgtctcctcagctcctttctttgagagcctggggggggggggagggcctttctgcgctgggagttgcttgaaggatccgtgcagtgtctcagcgaagtcctgtgcttactagagagttaaggcccgagggcttcagcatctttggggggtacaaatggccgggcatttgacaccatctcactccttgacactaagctccatgagatcagggtacagagacctttgaaagactgccccatccctgtctgtataggagtgcgcacagccagtgtccatgcaggagtgtgcacagccagtgtccactcgggagtgtgcacagccagtgtccatgcaggagtgcacatagccagtgtccactcgggagtgcgcacagacaatgtccactcgggagtgtgcacagtcagtgtccactcgggagtgcacatagccctgtccacacaggagtacacacagccagtgtcttacacatgagtgcacatagccctgtccacacaggagtacgcacagccagtgtccatgcaggagtgcgcacagccagtgtcctcgaaggagtgcgcacagtcagtgtctcacacaggagtgtgcaaagtcagtgtctcacacaggagtgctcacagccagtgtctcatgcaggagtgcgcatagtcagtgtctcccagcatttcaaggttgacctcaagttcatttgtgagatgattctgctgctctctgcaccctcttccccatcccttccttccttaatctttgttcttctcaaaattttcgtaatttagtgagtgtgtgtgggtgtgtacaggcataggcatgccatgtagaggtcacatgacacacgtgtagaggtcagaagctaactttgggagtagtttctccctgcctactatgtgggttcaagggatcgaacgcaggtcatcaagcctggcagcaaggtgccttgaccccccaatccatctcatctttgcgcctctctctctcattttctttcttctctctcttttcctcactccctccttcctttttctctcctctctatctctcccccttttctttctctttccctcccaccttttcttccactttctacttctttcttcttccttttccttctttcctctctttctgtatatctgccattctttccttccttcctctcttcctttcttcctttctctctttctctctctctctctctttctttctttctttcctccctccctcccttccttccttccttccttcttccctctctttcttctttccttctcttccttccttccttccttctcttttcttttctttctttctttctttctttctttctttctttctttctttctttctttctttctttcttgtcttactatgtttcctaggctggctttgaactcaccgtcctcatgaagctgggattcaggtgtgcacccctactcccagctttgagcagcctttcccctgcagtcctctgaatctgtaaggtctgtcccggacgcagttcggtgcagttagctaagacgttggtgcactctaattatacaatgtgtctcactcattcactcttatgatagtcgctaggggtccagagaccctgtgtctccgtgactatctatctggaatccatctcctttgctgtcttgctctttgcagagggtttcccctcatagattggcctgggcttgccaggcagatcgtgaattgttcagaacaccaacatcctcgtctcggtgtgcacactcccagacctgcccatctaaacctgagctgggaatgaatgctttctttccaggggtgcagcagagggaggctcccctaattgggtgactgcagcatgccgagagttgaactatctctgaaaatgtaacccccacccaaacacaggctccagtccttgccacagagtgggactctgcccttcttcatgttggcaagtggttctcagctgcaccagggacattccttcaggaacaagcaggaacatgttggcactggcagatttgtctctggtgaatcaaaaaggtgttctttgccctcaatcttctttgattccttgccacacccagtcctctgcactggacttcaggataccacctgtttctttgtaccttgtttaaaatgtgcccagcctttggccctgcccatatccttaaggctgatgtaaatattaatctgaacagcaaagccagaatggtggaaatccctttggtggtaggataaatccttagctgtctgcaagcaggcagggcagaggggagaaatgaccactgtgtgggaggaccccagggtccagaaaaccctggagtcaagtcctgttccactttggctagccataggaccttcacagcttctgcagtactcagtgtagaagggatcagtgcccggatactaaatatcacacacagcccagcaataggccttagcaagaattcctttatcatctccatctgtccgtccatccatccatccatccatccatccatccatccatccaacatcctgggtaccattgtcaaatgaaggaaacaactgtttactgagacatggtgctatgtagctcacatagcctcaaacttgctacgtagtggaggaggatgaccttgaactcatgacccctctgtcttcctccttagtgctgggattacaagcgagcagcaccatgccagggaagcatccttccctctgtgtctaattgtaaagtttctcattgtaggtttttatttaatgttttccttttcttctactttttcccttcatgtgtcttcttttttctttcttactctctagcccaggctatctggaattcgctatgtagcccattctggtcttgaactcatggcaattcccctgcctcatcctctcaagtccagattttagcctcccactccctacccttaagaacacttttagagcttttgggggtgaggatcagttgatagggtgcttacctagcgtgcgcaacactctgagttcaattcccagtactaaataactgggtttggtaccacacacctgcaatcccagcactcaagaggtgtggtcaaaggacccagagttcaaggtcatctttgagtacatagaaagttcaagggcagtctgagcccacttctcaaagccaataaataaaaatacatactcattatatggcatgtgttcagaaaagtacatttacacatatgtataagctagcaaacaattttaaaagtgccgatcatgtaactctcagtcactgttttactatggggtccctcagtagcacagtggttctgggcatgggctgcaggagggacctcagtcagacagacagacagacagacagactggcagacagacaggcaagcaggcagacttactaacctggttgcaaatatcaacaatgctgaagtcaagaagccccgctgtaacccatccactattaggaagtgcttgagtggggagtcggggtgttgaggggtgagaggaaggttttgtgcatgttaaaggatttggatgctgaggaaatattagcgtggaaacttcaattcacatgacatatttatttttaaaggccactcagatttcaaagtgaggggtcacatgccctgtgagccccatctgtcactctgcactccttcagggccacctaacctctcctgtcacttctcacccatcttgggattcaaacactgcaagactgtggagaagcctgatgcgatccattttaccattcgttaagtcatgaataaattaaacgggagcctattctttccgatgaccatgaccattccagctcctctgagcttgtaacactgtcttttgtttgttgcaggacttagtaattcgaattgtttttatccttggcaacctgacagcgaagagtaaccaggcccgggaacttttctccagagagactgggagcgtggaaactctgctcacgctgttccagagcttctatcaccacaaggagaactcaccaaagctgcagctctcagaagccaagccacaggcagaggccgaggacgtgttggtcaagctgacccgtgtccttgccaacatcgccattcacccgcgcattggcccagtgctggccgccaaccctcgggtggtgggcctgttgctgagaactctgggtgagagctgcagccctgagacagatctgtgggaggccgtggtgagggcttggctcactttaaggaacctctttaagctgtgaaaaggaaaaacacttttgggggttggatcagttggtagagttcttgcctgatacacccagcctggggttcagtgtccagcaccccttataccgtgtaggctacccatgcatgtctgtaatcccagcgctcgggaagtagaggcggagaggttgaaggccagcctgggctgcaatgggacctatctcaaaaccaaaccaaacccaccacaaaacctttctgcctagtggtgccttatcgcatcccagatttcaaaaccataagaccaatagtgacataaatctttaccaaagagtatagtcaccgaatcatgccctttaaaaggacgagtgttgggctattgagatggcacaagataaaggtgcttgcagtcaactctgacaaccagagttccattccagggtctacaaagttgagggaaagaaccaatttctacatgctgtgattccctcacataccctgtgggctgtgacactcagtaggcagataaataaataaaagaaactattaaaaggttgttttgttttgttttgatgtttttgttttgttttttcgagacagggtttctctgtttagccgtggctgtcctggaactcactctgtagaccaggctggcctcgaactcacagagatctgtcttcctgtgagacaagtgttgagattaaaggtgtgggccatcagtgcacagccctaaatcacagcacaatttaaaataattttatcaatccaaagagaaaaaaaaaaaactggccagaagtttaaaattctaaagttttccagggtcagttcctacaaagaggattcctctctctttccagttctgtgtcacctgtctgatgtccccttccttgatgccctgcccttctaggttactgtgccacaacagagattgatttcgatctgtgtccgaatgtgcctgagtatacggcctgtgtgaggtgcttacagaggccagacggggtccccagagtccccagatctggagttacagatggttgtaagctgccagatgtgggtgctaggaactgaactctggtcctttggcagagcagcaagcaccctcagctgttcagccatcgttccaggctcccacagcagaaactgatttctcgtgtatctggaagcggtggttctcagtcagcaaggcagccatttctgtccctggaaagaactcctcttctggctactcactcactgtgtgcttacatgatctttcttttttttccactgttgggacagggagaaagtctgtctgtctctttctttctattttggggaggtgtggggcaaagaaaaaaaaggtggtccaaaagtcttcttgccctctctacaggggctccccagtgatgtaaccttcccccattagactctacctctcaccgcttgggcaccactgtagaagcgtggaccagttctccctcccaaagactcaaaatatatttacaaataccttacccatatagcatagcccaggttttccttaggctcactatgtagctaagagtgaccttgaactcccaatcttcctgcctctacttcataagcaatggttttacaagtgcatatcaccttgcccagtttatgcagtgctgggaatcaatccagggctctgtgtctgccaggcaagccctccaccaattgagctgcatgttcagccccatggaaatttacttggagtcccagaaaatacttaaagtccaagcccttgtttcaaaaaactggacatggtgggtgcactcgtaatcctggcacccaggatatggaggcaaggagatcagtcagaggtgggacagggctgggtgacagaggacacaagaagccatctgttgtctggaaaacagagctcatggtgagtgatggatgatgactctcaaaggaccactctgctgggaggcaggatgtgggaagtgaagcaagcttggatccctgagaccagggcacgtgggaggggtcaggacagctcaggtcactgtggtgttgtccccctcactgccgacatagggctccacctaactttcctagacatggctgtgggggttgagttagcatattctggagcccaactcgctcccagctccaactcgatgtctgttgtctgttgctgtgaaggtggagtcaccggatcggatctgcggggcccagtgagcaagtgggcgtttctcactcccttattccttggtttcagaatccaagtcactgggcgactgcgaggagctggtgatcaacaccatagcagccatcaacaatctgtccttctaccaagtgaagagctctgtcctacaacacaggaagctgtatgttgctgaacgtaaggctcagagttggccgtggcctcacggacattcacttaaggtcttgacattagttcctaagcacacacctgggggagttactgggacagctgccccacatacctgcgaacctttgaacatgggaacagtttgtttcttagttttttgttgaaatgcctcaaggtttgtattttagcaccattaaaaagaatgttaactagtctcctaccaaatactgagaacataacatttatcattcacttttaaatacagttataggaagaagtagagaataatattaccagtgtaagtttaaagatatgtaaaacttggagcatgccagaggcagaggcaggtaaatctctgtgagtttagggccagcctggtctacattatgaagcctcactacctctggtactgcctccctctctctctctcctctttctctctctccttcctgctttctaatatgcacacatacatttatgtagtactggtagaaagtacaaatggtatttggaagttattctaaattgacccacgttttctctgactgccaaatgcagtgctcttaaggctccttgtgagtaacaacatggagaggattctggaggctgtgcgagtcttcggaaatctctcccaggaccatgacgtctgcaatttcctcatgcagaaaaatggtgagttaatgacttttaagatccttttttttttttttttttttttttagtttttcgagacagggtttctctgtgtagccctggctgtcctggaactcactttgtagaccagtttggccttgaactcagaaatctgcctgcctctgctcccaagtgctgggattaaaggcgtgtgccaccacgcccggctcgttaagatcctaagcacgtgattcttgccaatagtcagtttagcaactcgaagtttaggcgatttgagtgcgatgttggtttctgttttgagatgaaccagactttacatttgtcccgaatggggacagcatgggatactggaatatactggaatagacttaaggctgtgtgacgtggtggtgttcacctcccctannnnnnnnnnnnnnnnnnnnnnnnnnnnnnnnnnnnnnnnnnnnnnnactggacccctacttgagtatgagaaaacaggactcacagtccatagttccatcccctaggagtaagggggaaaatggtggccccaccccctaacttacactgctcctgcactagcagtcctgagctgggcaagccagtttctagcagtctaagcatctcttgtgttttggaggtatcaggaaagatctcatctgttgcctcaggctgtgccttagagttacaactggaggttcaaaaaggcctttgagaacaatccagaaaaaggaaagaaatattacccatgttcccttcttcccaccagtgaggactcatctccctggagagggagctgctgttgggtcagtggtagcagaaatagggccagaagctgtagacggcaggaattggctctaaaagtggcgggtgttattgggtctacaatgggaatgggataaacttaggagggatgggttcaccacactaaccagaatccagcgtggcaagccgcaccttcccactctcttacccctagcccacctcatttgtaaagccagctccagctgggatgcaggcctggtggtcccgggtgctcactggtctacatttgtcctctgccctcccagtacacaagttcatgatcacattgctggaagccaagcaccaggacatttgcttctctgcctgtggggtcctcctgaatctcacggtggacaaggagaagcgagccattctgaaagaaggtggtggcattaaaaagtaagcttcaaggcgaggactccggcaggaacatgcttttcctgggaggttgggggcccatcgatcttcccaccagaggagtgggtgtttagagcctaccccacacttagcgacacctcagaggcgcatgtgtgaaaacctcgtagtcagttaaacttgtagccatgaatgtgaatgatgatcatgtgggattcagaagcccagccgttatgataacaatctaaaacccgaagacaaattcccactcactaactaacacttgagttccgcacttcttactcaggttagtggattgtttgagagacttcggccctagtgattggcagctggcctgcctggtgtgcaagacgctgtggaacttcagtgaaaacatcaccaacgcatccgagtgttttggagatgatgtcgccaacacactcctcatcctcttgtcgacatttttaggtaagtatgtttaaaagcatacagtatctgtcatcattaagaaaatacggttaaaggctgttttgaatgaagtcatggtttcagatgaatctatatgttaattagtggtgttgattatcacttggagaagggactgtgaaaggacttgacgccgcagtggggtccttgggctcagaaggtaagaaagcatatacagtgaaggtcatcttcttctttagcttttttccaacctgggttaggtctaaaaacaataatttaggtcagttgaagagtgaataattttgcagattctattccctacatggaggtagggtccacgattagccagttatatatggaccagcgtagctatgtggaaaggcccagagtaactaagaagtcatgggcttgcatccttctggcttgtacttacggtgctatttgaatactgtatctctcttttattgcgtgtctttctgtctctaaaacaagagtgtgatgaagtctgctcagtctcagaaaggcttagacagttgtcacaacagaagcattacaaaagaccccaaagtatgccaaccgaacagctccaaaatgtaggttcttgctttatcctttgtaaattttaaaatcttgggcttagcctcttggcttacttactgtcctgtttctgggaagagacaccagtgaccacaacaacttctataaaagaaaggattttaattggggctttcttacacgttcagaggcttaacgcatttgcaagcagggagcatggcagcacccagagaggcagacacggagaggtagctgagagttctacatctccaggtattagaaggagggggaggaggaggaggaggaggaggaggaggaggnnnnnnnnnnnnnnnnnnnngaggaggaggaggaggaggagagagagactggtcctggctcaggcttttggaaccctaaagctgtctcccagggacatacttcctccatcaaggtcacactactctaacaaagccacaccccctagtccctgtcatgtagtgccactaatggccaagtgttcaagtctgtggggccattctcattaaaaccaccatacctctttacgtttatattgtaatcccaagttcagttaattgatgccttccattcagagtgcctaggagtgaatgcatccttacaccaagagtttaatacggtgcctgattccagacaagactgcaaggacagataatgtgctttgtgaatgctaggggatgcagcagaaccttactggacaggaacagacgttcagaagttccttgaaagaatcggatctgcttggcagttaaaaggagtttgtcatgaaggtgtatgcaggcatgtgtgtacgtgctttaaaattcagaggaagaacaagaatggatccagttgtaaatggctgaagtcctcagcgtccttgcggacacagaggtttctcgggtggcaggaagcaggggtgcctgcacaggttgtccgagttcagttccatggagtctgagcatggaaatcagctgcagagtcaagtcagtgggcgggtgaggagctaccttagcagttctggcttcagggcctctgcatccaacctgggagtacatgatttaaatgctggcttggctccagcatgggggacctctgttctagttcatgaagatagtccagggaagaactagcaggaaggagaaagtctcctgagggtttcttggatcgatccatccgctcaggacccttgcccctcctacctcgtgcttgctcagacattcccctgcctcaggcttccactctcacacccagtgtttgctgctgtgtctcctttgctgttgatattcttccctgtgtcttccattcagggagagagacatggctggcttagggagccactcaccagtaagctgaggttttgttttcttccctgaaagactgaccttagctgtctaagcttgggacaatcagctgtgagtgatgggcatggcagcctgtaaggaccagccagaaaggtgtggcagagttgcacctgggccaggcacaatccccagggggtatctggttgtagttggcctattgcccacactccattcccacgtttcccatggggctgttccagccttgggccccgacacattctcccagccgttgaagcccatggttgtggttggatcacaggaatcctgggctgttaataaagcagccggtcatgaagcatggcccatgtgatctcccctttatgatggttttgtaaactttctcttcacccactgaagccgctggagggaaatcacatcacttcatccagagtaggtgcttgatgagagctgtgattggctacaaggggtgctggcttcctgttgagtgatgctgctgttacaagctctttgtttaggatcttaacactacaatggtgtagcgacgggccactcagtcatccaggctagcctcactctgctctgtgagagaagtccagtccatacacccagaatagttttgaggtcattagccaggcgcagtcactcaggagaaggtgagtctaggaagtttcacgacctgcctaaggtggtactatagggaatggtgggtcttttcatcagaggatccacgtctgccctttgctttcctctgtttcgttctgtgcccggcatatgtctcctgcaaatccccatcaggaccagccaaatcagctcagcttgatcagggagccagctcatgggacaaagcatagaggtttcttttcatgattctcttctttttcatgggtctgagtgtgcatatgtgtgcatgcggggaacacggctgagagtgagagccatcctcactacatcttctaccttattcaacccagagctcactgatgtgtctcaggagccagtttgctccaaggagcccctgtctaagcctttcaggactgggatacgggtgtgccaacacagccagtgtttcagggtctgagggcctgaactcttgtcttcacatgtgtgaagcaagtattctaaccaccgagcagtctccccagcccctcctcatgaatctcaaggcctgggccctgtggactttgtagtctgtgctgtggcttggccctgctcactactgtggctctcaggacttgccttcagccaagggccatggctgtgctgtgccagacaatgccagtgaggcaggcatgtgggggcggggcacttgactttcagtccttttaaaaggagctgaggattagactggccatgagaaaaacagaacaaggttaaatcacaaaaccctgttgtgaagtgtgagtgttggttttgaaaatagatgtgataaaagtagagctctgacagttacctaactgaaataaaactcagagagtgacaatcttcaatatagccatatagtctaaaactccctagtgtcacttacacacacacacacacacaggatataatatatatgtattaatctatctacctatctattcaatatccaatatcaatatattgaataccaaggtattcaatatattatataatgtgtatacaaatatatattcagtgtatctgtgtgtgtctgtgtgagtgtatgccacatgtgcatgtgttcacaaaagccagaggaggatgctggattccctggagctggagttagaggtggttgtgagctgctgggaaccgaactcaggccctctgcaagaatagtgtgcattttaaatcactgagccatctcttcagctcccaaagtcatttcttacaaactcattattgaagagcttttcttggggcccgccacaaactcctctcaggaagctgccaaacagagacaaatagatgtgtgcagtttgcttttgtgagtttattgttgtgatgctgtgtataggttagggattttttttgttgttattgttgttgttgtggtggtggttggtgtgattaaagtgattaacctttctaaagcccatatgaagaagccatcttgtcttcagttattttgaaaaattgtgattggagatttagatgcaaactaataggtgaaacttaagagattattgaaagaaaaattcacttcaatcgaatggttcttttctaaaaacaaagcaaattagtgcccttttaagttaagacactgtttgcaggggcacgtgggtgcatgctacaattcccagcactaggcactgcagaggctgcagagggaggggctggagttccaggccatttgtcctaatccttagcactctgagagactcacaaccatctctagcttccgttctaggaaatcctgggccctcctctcacctctacagacaccagacatgggcttggtgcacggggcaccaaccagggcaaacacccagaaacactagtaatgtcaataataaaatgaaaataactgacgggctgagcctggtgcagcgtgcacttaatcctagcactccggaggcaagagcagggagatctctgagttcaaagcctgcctggtctatagagtgaattccaggatagtcagggctacacagagaaaccctgtctcaaaaaacaccccccacaaaagaagaagaacaacaaaagacctaaagtaaacacacacacacacacacacacacacacacacacacacacacactcttaagtatttctgaagttcaaacaaactcccattaaaatagctttcttgggtacagtggtgtgagtctggtgtcctctcctgggaaatccagggcaagggaatcacgtgagcctaggatttatagattaacttaagtcctaggcaacataaaagaccttgtctcaaaaatgaacacaccaaacaaacaaacacctattaatcataaatcgcatctgtgtcgtcacatcatggcgatattaaaggtgacccggagtgagagtcctgccatgggaaatggactctatcttgtgcagtcacatgccaaggaattgttgtaattttgattttttttttctgatgcagatgaagaactagccctgaatggcagttttgaccaagacttagaaagctaccacaggctccactgggaaacggagttcaagcctgtggcccagcagcttctgcaacgcatccagagccaccactcgctcctggagcccctgcctgtcccttctttctaacgcgacagacacaggccacgggcagaactgggaaggcagatcgccctcacgctcaggaaatggtaaaagcatggaagcttttcagtattcacatacgttgagcgtttttaaagtactgattttagcgaatagcctaagtgttttgaaagaaataagcacctctttttctaggtattacagaaaatggatatatatattctcctatgagaggtatgagatggaaatatatgcatttctaagacttctctttctatttgctttgaaaacacttagaaaagacccttaaagatcccagtgacaaccttggagtgagcaagcttgtcaggtcactagctaagggacagtgcaatgaagacggaggctttgtccacgggaagagtggcccaccctctgctgtagctcttactacatcaagacatgagttgctctccttgtcctaagagaaggaagaagcagagaggagagagagctacgtggagggctggtgatgtagctcagcggcagaccacttgactcccaggttcaaggccctgggtttgatccccagcgagggagtaaaaggaactactgctttaggtcatctgtccttttagatttttagggcttttctttttcttttgtttgtttggcctgtatgtatatttatgtaccctgtgcatgcagtacctgtggaggcaagaagaggccatcagatcccctgagattgctgtcatagatggttgtgagcctctatgtgggggctgggaattgaactcaggtctgctgcaagagcagccagtgttcttaaccactgagccatctctccagcccctacttttaaaatatttttaaaattttaatttgtgtctgtctgtctgtctgtctgaataaacacatgttgtatgtctgtgtgtgtgtgtgtgtgtgtgtgtgtgtgtgtgtgtgtgtgtttccttgaatccagaagtgggtatcagcccctagaactggagttacaggtggttttaagctgctggacatgggtgcttggagccaaactcaggccttctggaagagcagcgagtgctgttaactgctgagccatactgcagccccagccatctacttcttgaatgaagtaaaacagatgaaaaagtacctttcttttcatttgaaatagtaaccgaattagatgggctgtccccctcattagaacatatccaagagagatgatataacagattagagagtacacagttagctataaggcatccctttttgactcctatctctctgctgctgggggtggggtactttagacaattaactaaatttcttgagtcatattgtaaagtgagaatattacctctctttattttagtgtatgcattagttagggttcttagaagaataggatatgtgtgtgtgtgtgtgtgtgtgtgtgtgtgtgtgtatctcctacctctctctctctctctctctctctctctctctctctctctctctctgtatatagtaaaagatttattaggttgcttactggctgggaaacccaagaatggctgtctgagttttggagatgtgaggagccagtatctcaccagtccaggaggctgagtgccccagcagcctcagtctggtgctgaagactgaaggattcctggagagcatccgatcttcaggccatgctagagactgaagcagctgggttcccaagccgatgaggaagcagcactggcagaaacagagtggatgcacttgccagcctgagcaaaagtagaacggcagaaagcccacgtttgccttagacctctttgcagctgggttgcctcagggagagcgagcagctgacactgaggggagggaaggatgtccgttctcccccccacccccacagagaagctttctaggaaataccctgccaggcagacatatcttagtaggtcccagagctaattggggtgaccaccaatattaacacacaacatagtttagagcaaagccttaatcagcaggttgtgggcacacactgtaattattatgatgagagtctgtttgctcgcttgtctcaggaggataaaattcgcctctgaataaattatttaaaaaccaaacagttgtggttattattgttcgcctattctcgcttgaaggcttgctagtcttcttggagaaagctttatgaacagttgatttttgaccccaaacgtgacctcaggaatgaaggcaggcacaccagactgaatggagcactgaaacttcttcgaatgttctacatctccagaagcaggtcgattttgcaaaggcgggttctaatccgtacatggaagaaggctcagcatagcagatgaagttcatgtaaactcagggcctaatttaagtgctacgaatggaagtctatttgatccgtggaaacctacatattcttttggtaaaaaaaaataaataaataaaaaataatcaagcagggcggtagtggtgcacgcctttaatcctagcacttgggaggcagaggcaggcagatttctgagttcgaggccagcctggtctacaaagtgagttccgggacagccagggctacacagagaaaccctgtctccaaaaaaaaaaaaaaatcaaattcttccacacttaaaacattcctccctcaataagtacaaatgctagctcacggtatgggccccattttctcctcacatggaacacttcccctggagactcagggaggctgagtcctttgtgtctatctatttgcaagtgtcttgggggaggggcaatgactaaaaccctaaagtcttccattctattcctttttttttttttttaattttatgtgtatgggtgttttgcctacaggtatgtctctgtaccaccagcatgctggtgcctgtggaggctaggaaagggcattgtgttcccttgaaccagacttacagatggttgtgagccaccattggcactgggaatcaaaaccaggtcctctaggggagcgctcttaagaggtagggagccatcactctagccccctcttgtttttttctttttgaagtttctatgtatgtatgtgtgtgtgtgtgtgtgtgtgtgtatatatatatatatatatatatatgtatatatatatatatacatatatatacacacacaatgttgaacccgttccctccaatgtcccttcccctactcttctcaaccctccccctcccctctctcattagtctcccttgtctccctagacagttttatttgtgcttttaagtcctgcacacacaaaacccgttcatctccctggcaccatggcaacatttgaagtctgtactttagtaatgtgaaggaaacccactttgtcctgcagcagagttccagaaacttatcttgcaagccagaacttttacccagtgtcggtaccttctcctgccttcccctttctgggtctatagtctagtgacttagatagcttcatacaaatggcaacaggtagtatttgtcttttgtagctggcttgtcttcgacattcatttgttacagcaagcaacagaattccctttcttttcatacacacatacacacacacacacctcatgcacctccacacatcacactttgtccatccacccactgctggacatcggtactgcttctaaaccatagctgttttggatggtggctctgtgaagtcttcgggaatctttttttaacattttcctctgtctccctgtctctgtgtctgtctctgtctctgtctgtctgtgtgtgtgggttggcagggtcagtatgcacatactgtggtatgtatgtgcaggaaggtcagatggcttttgggagttggttctcatcttccatcacatgggtcctggggcttgaactcaggccaccaggctgggtgggcaagcactcctagccgctgagccatctcacaggcttaacaagttattttctgggtgtgacaaaaggtgaaggcccaacttcattttttccatgtggccatctaccttttccaaagccatttgttgaagggactgtcttctttcacaggtggccctggctcatttgcaaggatcctttgtccgtgtgcacatttgcttgtgtttctggttctccgtagatgtattttcctactctgttggtctcttgtttgtctctaagctagtatatgtgcacattacccgccttgactcattttatagagaacactgactttgtccttttcaatcccctcctcctttattttgtgtattcaaggccctctggggctcaaggtgaactttagatccaggcacagtgaaacagatctgctcaggagagggagctggaagccatcctgggctacataataggttcaagtctagccttggcaactaaaggaggccatctcagaataaagagtaaacagcaggctgtggatagaaatgagcccagagcatttgcctagcatgtgtgcagcctccacgttccatctctggtactgaagaaatttagaaagatgtaaattttagaatatggttttctctcctgcaaagctctatccctgaggagtaaagataactgcagtgaatgtgcacattgctgggcgtggcccttgcgttatagcgatagtgagtcctgatggtcgtggccctagcgataggtcttctaacccaggagcacagctttcatttcctcgagtttttaatttctgacactgttttataattttcagaagagaactttttcatggtgtctacacctgtccagtctgtgatgacagaatgccttatactagacagtacacttattgctcatggtcctggaggctgcagagtctaaaatcaggactttggtcctgatgcaggccttattatatatattatgttatatatgttatacatgtctaatctgcataaagtttgctgtatgtgtatattacatatattgggtgtgtatgtgcatgcacgcctctgtatgtgtgtatgtgtgtacatgcgtgcaggctcatgcatccatcgaatgtcacagcgatactgtagagggaagaggacatcattgagtcagttctcttcctttctctaaggatagaactcaggtctttaggcatggcaggcagcaagagcctttaccactgagctatcttgacagccctctaatttcaactatttgacttttctttctagttaatgtggctaaaggtttatcaattgtgtcaatcctttaaaaaaaaaaaaaaaactttgataatccttaatgctgtttcgtttccctggtttcttgtgataggattgactctcctgttttttcctccccgttctcttttcctccccttctctttcctccctgtccatccatgctccctcagcaatgctccttttaatgtagcttcagtctccactctttggagtggagccagtacatttaggcactgcattttaaattttcttttgaaaaagagatgcttgcaaatcccctgatttctcttgacccattaacgctgttgtcgaagttgtatatccttgtgggttccccgagttccttgtgttgatgatttctaacttcgtgtcactgtcatcagcatacaggtcaggggctgtctgcctgtcagtcctggggaatggcccgtgtgcacacgaaagagagtggcttctgctgcggcggatggaagctctgtgtgtcagggcctcctgtgctggtcaagccttttctttcctctctgacctttggtttggtgtctgctcactgttgaaagtgggcaccgatgtcaggcgctgatactgtacgagtacatgtctgtttcttgtgttttctgtattttagagctctgatagctggctgtgtatgtttgtaaccatcaagtctttctgctgaattgaccggctgggttacatagtgatataaccagtctcattttcatgcttgtgacaatttttgactaacatctactttgcctgatggtagtataaccatctctgtactctggcttccatttgtgtgggatattaatatgtgctcctttatatatatatagtcccttaaatgcagcgtatagatgcttttacaaagctatccagttggcctgtggatccacagttatgcctgcacatccatttatagttgacacacttatggacgggaaaggacttgctgctcttaactagcttctccttctcttgttgccctttagccctcattttctctcggccttctttgggtttcactttttatttctgtttttgtgacatgcttttattatctgttcattcccttctgtatttattctagccatgttttctttgtggttaccatgggaagcgtagaaagcactgtaatcgtgtaacagtctatttttaactggtaacaactttaacatacaaaaactatgcctttatagccgcacttatacctctatttacatactatttacatactgcatagccatttacatagccatttatattcatgcctgtcatttttgaactctatcagaactaatagtgagtataagtcccagaattatacaagcgactctgtcataaacttgttcatgtttacctttgctgaactttgatttcatgcagccccacactggagagaccactgcctatactatccttttgccttccagatgaagtttcctttgtagggcaggtctaatggtaataaatccccatagctttggcttatgtggaaaagtcataactcccttcacctttgggagcccctgacagttgccttcctgattagcaggtgatttcttttggtactcctaatgtaccatctctgtatggtgtcctgaacagtttctgctgggaagctacaagtcttacacccttacaggttgagttttcttcccttgcttgtaggcttctgtcttgaatgctcaatactttgactatacaacagtgtccgggcttccttactggctcggtggctttatcggatgttcactgagcttctttaattactgcatctgtttccttcttcagaatttgagtgtttgttagcaaacgggcatttccactggcctgctctcagggacctagcagcagctgccaccaccgggtatgctgtgcccaaaagggccccagccaccccagctgcttcttcccttcaccttcccccgacccaccatctctctttccttcaccttgtttctctgtttgtctgcctctcttttcctcatgtgcccactccaagacagcccttgctctcgctcaataaacctcttgcactaagtctgtaatttatcagagacatcatctggcccaggcttgacaaaggtatcccaccacttgccaccctttatccgcccagtgtctggagtggaaggacaaatgagggctgtgaaatggagcacagtgtagagtgactgtctagtatgattgaggtccttggtgccaccaagccaagcaaacaagcattttttgtctctgaatagcttccctgtctcacatctaagacttctcacatgtgcgctggccgcacggtgttggaataccctttcagtccttcattttccctcgttcttttgctcctgcctggcatggagtggcctgttcttcacattcagcagttttcacatgtctgatgaagtgggaatctttcactggtttccaggtactgtctcatgttttcaggtgtgtgccccaagctggcctcagacttgcttaggtatcctaagtctgcatcaacccccacgtctggattacaggcaatggctactaagattttcatgaaatttgtttttttccagttgccttgcagttttcctgctgctcctctgcgccctttgctgccccagtatctgcctgcagacgccatactttgtgttcttccagtgcactggcttttactggttttcagcagcatcagaatcatctaaacaatgccagcaagtaccaccagtgtcccgtcaagggagacaaaagccagtcttggcagcagaagctggactttttcctttctgtcctgagcatgatctgtgtggttttcattcattctgtgctgtgccgggaaggggctctgctgagccctgtgtgcctaattaggcttctcacaaaacacttctctctgcattgctgttaacttagtgtcttgccgggggttgtagtgcatgtctggtgtcagtgtgcaaggggcaggcaccatgcaccgctgcaccgctaacgcataggagcatctgaggatactgtttgtttcccacaaggggtctactgtgtctactgtgatttgagggtgtcctccagaaagaagttctagagctgggctgtgggacagaggacgtgcttggtcctgggaacagcactcagttatcggcgactacttttcacagaggaatgggttcatgatcacaagagcctggctcttgcttggtcctgagcgggagcagcttgtggctctgaccagacatggcttagtctccccagcccccagcatcatgagccaaggtaaccccttttcccctcgacaggatatctggatccaagtactgagctgtggtgatgcacaacggactctcacagccttgaagaaggtgccacctggtttcctaccctgctgcactgctttttaaaccagcaggtttcagagtagctctgctgtttatcatctgccactcctctgaccccagtgtggttcagaactgaaactcagatttggctactaactgtgaagctaaagtataacatgaaattaataaagcaaactgtggaaattactctttattgaaaaataccagtaatactgacagacttcaaaatcaatttacggttccagaatacaaagtacttaatacatttttttccaaacctgtttgtatctcaaagttagcatttttgtaaatcaagatacaaatatgataacttcactaaaatattttccagctttattctttaaggagctgtataaccttcaaagtcagggtcccgaggtcagcagggcatggggcagaatgcacctggcactccctgtgcagcagactgcaaccacattttccacattgttggcaccggaaccaaaaatcccgcacaagacagctgtcctccaggctcagagaatattgggaaacgcacatcaaaagatagcctgttttccttataattaacacactatcattttaagattgctctttggaggaaatcttttaagaatgtcattgcaatatcatccaataactgaattttaaaaactataatgaaagaaatgaactgttaccgccaacacggtcttgactgagctgtgagtaaaaattctatgcttttttagatgcaagaaaataatgcgcatgagttcaattcaaaagcacacaaggtgtggcgtgggctcaggtggtagcagcactcagccaaatagccatgtgctcatccccgcacagcagcaccgagcgccactcaattccgcatgtgtgaacttagtagccacgtcccagtctttacgcactctgtcttgtcaccttgtcacatcagagcaatgggatctggagatttactagttgctgtattgaaacaagttcacagcatctcgtgctgtctgtcaaaaagcaaacactgtggccggcagcctttcttcccagctctaacaccaaagctgccgagtgctcactgctagacaggcagtgagatcccacagtaaaatagcagacactaaaggaattgtggcacatggatttttgaatgctttttatctactgttggtcctggggctcttggttccatccccttgtacactaaatgtgctgttcattccagggtcatctttaatggaggagaggcatcaggtcatataccgggtaatggctctcagagcatacaggagttctgcttgcatcctagcttctataagaagcagattaacatggacctgagtataaaatacaacaacacataaggacaggttagaaacatcactgttttctgtgcattcaattaaaaacaaagtcccaaatgagtgcagttacttgtcccttaatgagttgatggtttcggattctccttgggtaacccagtccccgggtgtcacactagtgcgcgttagtgtagtctaagccctcagagcacaacataaagcagatgggtggctgctccagggtctggaatagtgacagatactgtacttgttactcagcacagatacaatcattgtaaacattcgtgatcctcactcggctcagtctatggatgcagaaacatgactctgaaaggctgactgcatagtctatgtgctaccaaagagcgtacatctttacttgttagcacaatatcagatttcttttgggataaatgtcttattcttcttacatttgaccacatgtcttcc

SEQ ID NO: 2534 - DNA, 1981 bp, Mus musculus
aagaagacattgaagagatgtgtgcagcctgcacccagctccatcgcacgctggaggaagcgcgcatgctcggaaagaagttcaagcgaagaactgtcctgctgaaggctctgtataagctagtggatgctgactcggacccgctcagcctgaagcttgccaaacttatcctagcacttaaagtgagtggaaagaaccttcttaacgtctgcaaactgatatttaaaatcagcaggaacgagaagaacgacaccctgatgcaggaggataacatcctggaatcattactggaggtactgagagctgaagagctgcaaagtaacaccgaggcttttctctactgcatgggggctctgaaattcgtttccggaagcccggggtttcttactgagatggtcaacaagggtgcagtggaaatattggcacagctgataaaggaaatgacggaggacacggagaagcacggcgtctgcctgcctgattctggccatttgctagtgcagacaaccgcgaccttgagaaacttagtcgattcaccactgacgagaagcaagctcctgaacatgggggcctttccccatctctgcacagtgatggaacagcatgcagacgacaaggacatctgtaccaacatcgccagaatctttagcaaactaacctcttaccgcgactgctgtgcagccctggccagctattccaggtgttacgccttgtttctgagtctattgaacaaataccagaagaaccaggacttagtaattcgaattgtttttatccttggcaacctgacagcgaagagtaaccaggcccgggaacttttctccagagagactgggagcgtggaaactctgctcacgctgttccagagcttctatcaccacaaggagaactcaccaaagctgcagctctcagaagccaagccacaggcagaggccgaggacgtgttggtcaagctgacccgtgtccttgccaacatcgccattcacccgcgcattggcccagtgctggccgccaaccctcgggtggtgggcctgttgctgagaactctggaatccaagtcactgggcgactgcgaggagctggtgatcaacaccatagcagccatcaacaatctgtccttctaccaagtgaagagctctgtcctacaacacaggaagctgtatgttgctgaactgctcttaaggctccttgtgagtaacaacatggagaggattctggaggctgtgcgagtcttcggaaatctctcccaggaccatgacgtctgcaatttcctcatgcagaaaaatgtacacaagttcatgatcacattgctggaagccaagcaccaggacatttgcttctctgcctgtggggtcctcctgaatctcacggtggacaaggagaagcgagccattctgaaagaaggtggtggcattaaaaagttagtggattgtttgagagacttcggccctagtgattggcagctggcctgcctggtgtgcaagacgctgtggaacttcagtgaaaacatcaccaacgcatccgagtgttttggagatgatgtcgccaacacactcctcatcctcttgtcgacatttttagatgaagaactagccctgaatggcagttttgaccaagacttagaaagctaccacaggctccactgggaaacggagttcaagcctgtggcccagcagcttctgcaacgcatccagagccaccactcgctcctggagcccctgcctgtcccttctttctaacgcgacagacacaggccacgggcagaactgggaaggcagatcgccctcacgctcaggaaatggtaaaagcatggaagcttttcagtattcacatacgttgagcgtttttaaagtactgattttagcgaatagcctaagtgttttgaaagaaataagcacctctttttctaggtattacagaaaatggatatatatattctcctatgagaggtatgagatggaaatatatgcatttctaagac

SEQ ID NO: 2535 - protein, 572 aa, Mus musculus
EDIEEMCAACTQLHRTLEEARMLGKKFKRRTVLLKALYKLVDADSDPLSLKLAKLILALKVSGKNLLNVCKLIFKISRNEKNDTLMQEDNISLLEVLRAEELQSNTEAFLYCMGALKFVSGSPGFLTEMVNKGAVEILAQLIKEMTEDTEKHGVCLPDSGHLLVQTTATLRNLVDSPLTRSKLLNMGAFPHLCTVMEQHADDKDICTNIARIFSKLTSYRDCCAASYSRCYALFLSLLNKYQKNQDLVIRIVFILGNLTAKSNQARELFSRETGSVETLLTLFQSFYHHKENSPKLQLSEAKPQAEAEDVLVKLTRVLANIAIHPRIGPVLAANPRVVGLLLRTLESKSLGDCEELVINTIAAINNLSFYQVKSSVLQHRKLYVAELLLRLLVSNNMERIAVRVFGNLSQDHDVCNFLMQKNVHKFMITLLEAKHQDICFSACGVLLNLTVDKEKRAILKEGGGIKKLVDCLRDFGPSDWQLACLVCKTLWNFSENITNASECFGDDVANTLLILLSTFLDEELALNGSFDQDLESYHRLHWETEFKPVAQQLLQRIQSHHSLLEPLPVPSF

SEQ ID NO: 2536 - DNA, 145430 bp, Homo sapiens
gctgagggcgctctgtttgtgaccggccctgtgagagtctgggcggacgcggtgcggctgtgcccagagacaagggaggcttggatccagagagcccaccccgccactcccacctcagagtgccctaggggaaggacagcagagccacgccctcctcaagaaaaggcacttgcagctgcggtagtgaggggcccttgagaaggcgggaatgggagggagaagcgggcttgttcctgtgcacaggtgaggtggcaccgccacaagcactcccagaaatgactggcagcctggggaggcggaggcgagaggggtctggggaggtgactggcggtggaactgcatcccggcacataagcgttacacttgaggacactctcaccctgcatagcatatactcaagttcacgttcgtttggtcgcttattccacagaacatccatatgttccagcttccattcttgtgtggagggcacccaaaggtgtgcaagagggacaagatctctgctctctgggtgctcgcctccatacagtttagcatctccattctcttcttggagttccccactccgtgacccagatggacaagaagtgtaatacacagtggaaaaaaaaaacacacaccaataactgaaaaagagtttgggatagctttgaaaacttcctgcagaggcatcattaatcttttttcttggtaaggttcttgaaagcaaggcctgtatgtctgcaaaggacctcctttaccaagtgcttggcgaacatgaaatgatgctgttccatttgggatgggctttcctccttgcagacatgacctcagggtggctcctggcgggagacccacagggggctctgtctgaagctgctgtaggagaccagctggtacaagaggcaatcacaatgttttttagtgcaaagcctggttgggtgcaaggctgcagtgggaggtggcgcatcacgtggtggggaagtggtgggggtggggggtgggaccctgccgcctaattagagggccggggaaggtaggatcagtggaaggcatgagcagcggcagccagtggacagagtgcagcagggtcctagcagagccagggctctccactcccgatagaaaatgagctgctgtggatactgccagcgaggccaagaactcctgcctttgagtttgagctctcaaaatcaaaatgaaaacagaaacatttgttgctttccataacctaataagaatggtgattgacacaccacccttcattttaacactctctgggtgtgaactttaaaaaaaaacaaacaaacaaaaaaaaaaacaaccagaaagaataatttcaccaaatgactttcagcactgaaattcacttttcctgggcagttaagccaagctattggttttcaagtttcagagggaaattgttttatccacactgcattgtggaataatcatcctatttatttccagaatgatatttcctctgcattttaacttttcacctataagccttacagagatgagatagtaagcaagagagtgaagaggtttattttaaactttttattttgagataattgcagaggcacgtgcagttgtaagaaataatatagagaaattctaagaggtcctatgtaccatttgcccagtttctccaatggcaacatcttgccaaactatagtgcaatatcatagccaggatattgatcgatagaatccatcaccagattcacatttcccttgtttgatacgtgttgtgtgtgtataggggtgtgtgtgtgtgtttagttctatgaaatatgaaacgttttgtgctctgataaggaaaagtgctttccaagtacacaatgattatcaggacattttctttgtggttattacttccgcatttttgtttttgtttttgtttttgttttgtttttgttttgagacagagtctcgctctgtagcccaggctagagtgcagtggtgcgatctcggctcactgtaagctctgcctcccgggttcacgccattctcctgcctcagcctcccaagtagctgggactacaggtgcccgccaccacacctggctaattttttgtatttttagtagagatggggtttcaccgtgttagccaggatggtctcgatctcctgacctcgtgatccacccgcctcggcctcccaaagtgctgggattacaggcgtgagccaccgcgccctgcctacttctgcattcttggtagataaatttgtagaccctatttatgtaatatcttctatctaataacataaagacttgtgtgactgttctcatgtcaatgaagatgtgtgcttaacatctttagcttttaaagatcttgctattagaagcaagatacattcagctagatttggaacctgctaggattccttgaatatttaaatatttaaacctgaagccggactccacatttccttgaatgatcacagttaaatcaaatttttctttttctctatttaaattgtccttcttgtcatattgccaaaataatatattcttgggctagtaactcaatagcacataagtacatcgttgttggttgttgttttttttaactgaatttgagcgcactaaggagaggaaaaaaaaataagtgtcctgggggacctccttttagcccatgggtccccagactgcctagggggttccttctaaaggaaactcacttctgtcaacacccaagagaaccaggaggcatgtctctcccagagtcgcaatccctgggggtcactgccttctctgtggggtggcgcatgcaggtctttctgtacacaggtgttgttagcacagcacaaggggcttgaggtaccaactactgacagttcaggctttctctcctcctatcccctctctgtgagtgcctcatctggcctcttgggacctctgaccaccccgactttctccaggacagtaaccagccaggccacttcttgaactttatcatctggctctcccatctgagccacctccaaaatctctaaccctcagccccctgacaacaacctcctcccgtggaatcccagagctcagcagtatcttaagggtcatttggttcaacttccacatctcaaagaaaagacagctgcagctattaagtgacgtgaccacagacacacagctgagggtgtgtgcctgtatgacctgggtaagcgaagaaacaaaacctcaatttctacgcatgtagaatgaggataatagcagtactttagggttggaagaggaactgatttaaagtgagcaaagcactttagtgagaggcagcatttgaattaataagatctcctgactttccttcctcaaactgcctcatctgctctgttcccgtcagtgacctcagtcctccagcctctccctaaccctgcagaccattcctccttctccctttacttccccatccagcctaggcctgtcgcctgccccttcagactttgttctctggccatccccagccctggtcatccccatacacacaatttctgctcctcctcctgggctatggggcattgctatataaagccgtaaagggtgggtgctgactggatccactatgaatttgaccaattgatctttctctctcctgtggactacttcaaggtgaattcctctttgcagtcctttccgatgggtgcccagtgctgagtagacatgcttgctgagtatcccatggcagggaccattcaaaaccaaggcacagaggcggagagatacagcgggtgatcagggaatggcagcagtctggtttggctgaacgtgtagtgtctataggaacatggcctcctaagtccaatgtgatggttaatactgagcgtcaacttgattggattgaaggatgcaaaatattgatcctgggtgtgtctgtgagggtgttgccaaaggagattaacatttgagtcagtgggctgggaaaggcagacccaccattaatctgggtgggcacaatctaatcagctgccagcgtggctagaatacaagcaggcagaaaaatgtgaaaaggagagaccggcctaggctcttagcctacatctttctcctgtgctgggtgcttcctgccctggaacatcggactccaggttcttcagttttggaactcggattggctctccttgctcctcagcctgcagacagcctatggtgggaccttgtgatcatgtgagttaacacttaataaactctcctttatatatatatatatatatgaatatatatacacatatatatgtatatatacacatattcatatatatacatatattcatatatgtatacatatattcatatatgtacatatattcatatatgtacatatattcatatatatgtatatgaatatatgtatatatgtattcctgtatatatgtatatatgtattcatattcatgtatgtatgaattcttatgtattatatgtatatatatgaatatctgtacatgcacatgtatatatgtatatgaatatatgaatatatacatatgtatacgcatatatacatatattcatatatgtatacgcatatatacatatattcatatatgtatacgcatatatacatatattcatatatgtatacgcatatatacatatattcatatatgtatacgcatatattcatatatgtatatgcatatatacatatattcatatatgtatatatacatatatattctattagttctgtccctctagagaaccataatacacccaacaagctgggcttgaatcctagattcaccactttcaccacctgtatgtcgacctggttaagggaagaaacaaaacctcaatttctatgcttgtagaatgaggataataatagtactttagggttggaagggaactgatttaaagtgatcaaagcacttagcacagagcctatgacatctaacccccaaataagtcctagttcttagaataacagagaactacagactatcatgcatatcacggaggatctgagacttgacttggtggtcagtgggcagacattgagagctcctgggcagagggggtgggagggcatatccagaactgtggtttatgacactcactttggttgctgagtgtagagtgaacaacactcttggagcaggaagggagtggagtggggtcagaggggccagttggagacgagatgcaaaaagtgcccaagatggcccggtgatggtgggggttggtgggggtggacatgggggggtacacgtcttggagagcaccatgagtctgcgacatggggtttttcatctctgggtcatgcataaattaggctcctctccatcccttgtgttctgaaagccagggtttcttcaggcagctctgcctcttgctgggttgtggctgaggttctcaggcaggggagctctggcttcaccagggctgaggttctccaggctggctgtgcacaccacagtcacctcagcagctctaaaaggctggctccactctcccatactcccacctatcccaggcagcgaatcagttcatctgggtgggttctgggccgagatggtgctgaagctctccaggtgactccgctgtgcagccaggatggagccacagtgagaccagggaccaggcgtcacctgagagttagtaccaagatagagcaccctgccttgtgttacacctccagctctctccaggtgggacaagcaactgccacaatctcttgattctcaggactactctctattacagtatcaagagattgtgacagttgcccattcagactggagagacctgtcaccagaccactgtggcggtcttccagatctatccaatagccgctgcccctccttcctgctgaacagagatccagtttgcttcaggttgtggcagcaaagggctcaaagtggtctcctccccccaaaacccgagggatgagccttgatggattgaaatcagtcacagtagtggtagccccatccatctctgccagggcctggtatgtggccatgtgacacagcctggccaataagatgtaaggacaaagtgaccaaggggcttctgggaaatgttttccttctcagtgtagagatatacatagagagggcccttgccctttcccagctcagtgcagccaccaccatcttgtgaccatgtggggagacttgactgatcttccttggtccctgagctgcagggccaatcctgaagcagcccagttccagtgattgttaaacaaaacaataaatgtccttggcgtgtaagctacttttggtggaatattctgttatttgcaggcaaaagcttccaaaagatacaggcatgctcacttagtaatgtctcataggtgagttggacaaagaatattgggtttctgattgtcttaattggtcccttttaacatccaagagttgttcaggatgaagtaattcatagttacaatcctactgacactgacatactccctgaaaactagaacctcctcccttccagtgaaatgcagggtccttagagactctgtaatctactggtaattaaatggaccctcattaattagcactcctgtcaacaacttggcagcttggtggagcacgtggcctggggtggcaggggtggtacgggataatgtacttaaaggtaaagtaatacttaggtgtacaggtcacagctgaggcctaataaagacaggatttacataaacattttagctgataagttttaggacaattccacagtctcatgtctatccagttccatgaagttagttaattttcattgaattgtaaatttccagcgagttgcattttaatgtatttgtgcctttaaatttgtatgcaaagattgcataggctgtcaatttgatgaactcctcacactatattgtgtgatatatataattaaagcaccaagattctatattgacaaaagcagaaagtgtcttgaagtgaatattagcattctaaattggcaattttcattccatgccagaagtatttcttccccctgtgagtcacagctcagttgtagtcataaaaatcactgggtggtgggggggagtggggggaattgtgaacattaaagaagtatttatttaacctgtatcttttcaagaatatatctaataggtaaattaggatgagctatagatattaaacagaggtgtatgtgatagaaactatgatataaactgtaaaatctactagtagagtctgtggataaaaagcatctatgagttcatcattctgttacaatttttgcatctgagactgcataagattgtatcattacccaatctcctgcctatataattcttgctttaattcaaaatccagaaattcagaagccattttcaagtgaatgtaaagattcttcagttcctcttgatccctatagccccatgcagctctgggataagtgagaggaggaaataaagagcatagcttgacaccttcagtagcctagaaagtacctttccatgctgggggcaaaatgcatgtataatagcagcatggcgtactgaacttgggcatcaagaatcccagatctcaaggtccttttactagctatgtgcctgtgggctgatcacttcacctccctgaacctcagttttcttccatctcaaattgagatacctactttccaggcttattgtaaactccaaattagacaaaagaagtgaagtgttccaaataaaagcaatttgggaaccataaagtgctttataaatgtcagatacttataatactttgtcttcctctttaatctctctaaagtgtgtgaaacatgtcaacagttttgtttctaaagcaatgccacttacaaaaccgatgtgaaatagccatcaggtagctgtggagaaacagccaggtcagtataatacgccactgctgttgacagcctaagtattttctcatatagcgtccttcagtgaggtaagttggggagcttcattgcttcaaataactgcttcctctaattctgcccatgtcattcttttcaattgtgctaatttgcccggcagatatttcctggccagctgagttgggtagcatcgggttccagtagcttgcttatggtctattttagaccaagatcctagggtgcaagaccacagctagtaattggctgtaccagaggtttttaggttgatgtttccactgagatggtaattatgtaatcatcagttccaagtgaggtgaggcagagtctccatagggcaggttacaaagaaacctaaaaccccctcagcctctcacccaggctgaggctaaaaataaggggtcagagagtggaaagggaagatgtgtggggaaacttctttggagaaaggagtgtggggtgctatgcccttcatctcaagccagcgagaggggcttccccaggggcctgggactgccagagactgtagttaggtggcctggagaactggagcctgactcactcctgggtaagctaaagctccctcctatggcagcctagaaggggctgcacccagacaagcctgagctctcagaatcactagggtaacagatgtgtagggtttcccttgggacctatctaaaggggcactgaaaggtggaataaaccctgggtttttaggatttccagaagcccccaggagggaggtccccatcagtgggagactacaaaggaccaggaaagacctacatgagctgctttaaccataagccagtacagcaagcttgaagctgctcaactccaggaagaaatgctccatctccttccttctcctcctcctcctcactgccagtttgatccaagctgggccttaaacaacctctagtgaatagaggggcgggtgggggtcggggacaagcctaagcctagtgcaccccttcagggaaggccagctagagaccttaagcctggggctggaatgggggaggaagactttttgaagtttgatgcatttgtttatatcttgcacccaacattatagttttgaaatgaagctgtggttgagatttagttacaacaagactgtcagttatctaagaatgagcagaaaaatccagggctgtttcgggtcctaaaattatccaatcaacgaataggtatttattttctgttatgtttgaaatcctcttgagtattttgaagaatatttacattcctttagttcaggttagtataatttcccacctggcacgatgccttacacatagtatgtgctcaaaaatattttcaatttaattattctttacaagatgcttagcaccaagggaagtggcattttcccagtgttgatgacaaatagcacttcagctggaaaatctccatatttataaaacgtggtgcaaacctgaatggagagtgcttatgatctcacttttatttaacactgtacagtgttgctaaatggtctaacaggagaaaagggaatttaaactagaaacacataaatggagtgctttttgccgttcaactgtgatgatgcacgaacaaaaaacgattggccacgggagacctagactggaatctccttctcctgctcactacacctcaggcccccagttcctctcctgtggatggggacgccaggctgcctacctcagactcagaaggtacgattacgtgcatacactctgcgaactgaagggctgtacaaatgcaagggcttaataacagccaacagtttaatattcgttgattgccacgtgcatagcgctttacatctattttctcatgcagtcttcataacagcccaagacctacctaggtactattattaatatttcctgccacttgacatcggaggaaacagaagctcagcaagtggctccaggttatacagagccctaacctgagccagtaaatccttcttacccacaagcattaagcttccgtcctgcctgctgttatttaacagaggtgctgggatccggcaggggagcaacaaatgtggttcggcaaattgctaaacgaaaagcggacacccgcccacgacgcctgctctgatctgacctcccggcctacagccctctccaggctcctcccacccgctccggccgtcgccacgcctcggagcttctacgcatgcgttggcgggacccgcgcaggcccagtggccgagcggcgtcgtggggttaccccgcccgcgccagcgctgcatccctggccgctacccggggagagccggaggatgaattgaacctcgcagccgctgctatctccagtgctcatcacaggtgctttgggtcaggtcggaagcctccttccctgagccctcgccaagctcattccccggcccgcctctcccgccctgcagcggcctggccctgcggtctggctgccggggcggcggcgggaggtagtttgtgtacggttaccatggagacgctggctgcggggcgaagtgggagggtggccgggcggggtgaggatgctgctgcgccctgccctggccgggaccgtggaggagcgggcactgccgtgggtgggggagccgctgtccgagcgggaggtgaggtgtccccagcggctccccagggacccttcctgccgtcgtccgcctgtgtgtcctcggatggggtagagagacgatgagtgccctgtgcatgctgtcaggggtccggagcggttgtcttttatttatgtactgtcgcacttagccaagtgcgtggtgcttaataagaagcccagtaatatttgttgaatgagagtggtagactaaggggctttgtctaggcaggcggtgaccgggccagagtcatacagtttatatctgggcacttccaggcaacagggcctcaataaataaaaacgtatgtgtaacaatatttaacatactttaaaatcatggagtgtatacataatgccttttgtgatccattcccacaagtaacacaacagatcttacgtcccaccctgatttataataattatactttaatttggttgaaaagcaagcaccatttattatatttatcctggtttcttaatctatgggattctggttgttgatgttgatttggcatagctgatattcaataaaatgcttaataaaaattatctgttttcataaaggcaagtaccaccacccaccttttaaaaggagaagtacgtaatgtaaatgacgagttgatgggtgcagcaaaccaacatggcacatgtatacctatgtatcaaacctgtacattgtgcacatgtaccctagaacttaaagtataataataaaaaaaaacttatgtatagaaacactgaacaaacgtcattctctcttttgcaatttctttttttaaatgtagtttttcattcgtggaaatgattttgctgtatccttttatcatgtagcacttgggcaataattgttaacatctttaagggccatattttaaaatgttaacatttttaaagcactgtgctaacgcactttacatgtattatatcatttaattcttcaaacaatcctatggggcaattattattactatccaccttttatagatgaggaaactgatgcttagagatattagaggcattgcctaaggtcacatggctgtgaattgtcagcatttaaacccttagtccagcatctaagcacttaaccactgcctctttggatgctcatattaatacaaaaatgattcagagttatggaagggtcctgagtatttgatttgcagggaagactgtgaagctggcctgcttttcccctgttgcagacatcctggtagtgcagtgttgcatttagcaagaaggctctggttccagtggctattagcagcaacgataaagacaggtctttataattagttataaacttctataaattatgactctgagctttcacccagaccagtaggaaatatcttgttgaaaaaaaagttcttcactttcaaatttcctactgctggtggtgttcaccctctagaggtcctgtggataccatggactcaggatagtgtgatgcaagacagaactcagcctctttcttctttcctcttgaaatcagcttctcctcctgtttcttttaaaaggtcccttgccctctggctcccctaggtttgcatacctagtgttgtttctggcctcttcctggaatcatggatgccaaatcctgttaattctgttctcagtgcacctcacttgttctcatctctcctctaacctctgcttcaccttgactcctgtatctcaggctttccgtacttcactcattcgtcacaacattgagtcctactctgtgccaggcaacttgaaataaaggcaagacagggaaaggaggctaaatctgaactcatctgaccacataacatcaaaaatcagatttgaaataaggtccagatttcataattcactgtaacaaatatctccagttagagaaactatgcagccttcatctgaaaatgtcttagctcaagtctatatttaaaaatggagtctagtgattacgtaagtgttgaccttcagctgtgcctcacgtggacggttggggcagagagtctcgggccaacaccacatgcacagggaattctaacacagtgggagagtggagtggcagagaccagcccggggccttttggagtctggacgaggggcacttaactcaggctagcagggtgggagaggcatgtccaggaaagcttccttgaggaaatgacctttgagagttagctgggtgattacataaaaactgtctgatttcactacttctgatctttgccctcctttccttcctgcccatctctgccagatcacatcatccctcaaaatgttgtatttgatctgctcatcaacttttgatttctcgccatttaatttatttggttcagccccaatggccattttcagagttccctcttgtccacacacaccctgtatgtcttgatgctctgcgctggctcacttgccgactttgttggaacttccttctctactccagctccagtgccagccactgccacttgctcaaattcagcccttctttcacaaccgagctcaagcaccacctcttccaggaagtctacctgatgtcttcccccaatcagaaatctcttcttcctttgtgatcacataagtaatttgtctctattgtttttattgctgccatcagtttctaccttgtatttaaatcatttgagtataagcagggtaaatactcactgggtacgtaccaggaaggctgctcctgttgggaaaatattggggtctctgtgtgaatgggttaatagttgcagccccaatgcctctaagtgccccacctcctaccagccatctagtgggtaagagtttgaatattatctgtgggcatatatcatagcttttttttttgtattgcttaagaccctgtccagaccatggattacatggtggctcacacctgtaatcccagcacttcaagaagccaaggaggatagcttgagcccaggagtttgagaccagcctggacaacatagtgagacctcatctctagttattattattattttttaaaagattctatccaccttgcaaaattgttgtggggttaattgagataatgcagtcaagagtacttagcacagtgcttggtgttaaagtaaatgtttatctcacattagtggttcttcttgcttgagagtgaagacggtcttttattcctctttgtgtttcctcttctgtgtttcccagagatctaagcagagggctttgcacataggaaacagttaatcagtacttctagctgagtggatttgctctacttggaaggaaaattttgtaaagttagaatttctgtaggactattgtgttatggttcaggtatactttaagtagataagctttcaggtcctgagtgattaatttttcaagttggcaaaaaccatctataataatttgtagtttaacaaatatcaatttaaaaatcctccccccaaagccccacttctaattcttctaagtcagttcacatgtattattaaatatttccatgattgatttagtgaatattaatatatgatcataacattgtgcagattttacattattgtacaagtttctcacaatataattgttaaagtgagatttggtggaaaaaagaagaaggatagagaaaattgtgttagaatttttggtaaaaatttgtagacaaaaatatttttagccctgtatctacattgtttctatcagtatagtatttggtcagtctaaattcctatatgcccccaggtaattcacagaatttttagagtttgacctgagtaaatgttcctgcttcatcactctctgaaagagtatagtttttaatgcaaactcaaagatagccagagagaaccttaggtcaggagtgagagtctattattactccccacagaactttctctaatctttattagatttgccagattacttttggacattgttagacttattagtgccatgtgaggccaaaggggtggcaaacctgatttaggctctggaagaagcctgtttattatacagaaacctcttctcacttagtggcataatttcttactgcaataggtcttttagaaacagaccaacaaacctgtcatggctgcttaagttagatgttacgggactgaatttgtattatgcatccaaaaataatatacaatatgtagatataaaaaattgtgtatatattttaaataattatgattgaatattctaaagtaaaagccaatcatttcaaaagtattggaaataaaatgtactaggcctctcatcatttttgatagttatattaatgaatgtaattgtagagactgtgcttaaattcaaaatcctgtatcaaaaattcctaaaatagtattgcttatcaagtaatttttttactgttttaactcaacacctggcatttccatatgaaaagtatgacatattgtttatagttttcatcagaaactcttggggtggggcctgtgtagaaggaaacaaatgttcttattgtctgttgttatgtaacaatgtttagaatcataatatagtaaatctttatttgtctaaggaatcacctgttgattctacttatagaaatggaatctttttagtttcctggggcatgtgtcacaaagcagttttctgttgtgcagaagttattctaaaattgggtagctgaaataggtgaaaaattcatagatctctgtctctttagagatatgacattttatggactttgagtttttttttaagaaacacctaatgctatatactcattagaattacattttaaaaatctgtcctattttaaagttcagatttgtctccatggaacacaccaacatttgagaaggatctgcattctcatggcccttgtaatgactttaactctttcaggaaggggtgttgggaaaggatcagttggtattgatatttggtatttatttacttaggtcattacctcaaattataggtgagttgaatcaattcattcagttatatcatggacaaatgtggggctgaactattctctgaggtttgttgcaaaatcaagtgtcctttagaaatacaacatttctgtctaaaatgtaaccttatagtatcactagtgtggagggcagtggggaagaaaaggaaactgtaaacattttaacagaaccctcagtgttttttgtaggctgaagaccatgagatgattcgctcttcctattctgtcttctttcatgattagtctttctctctgggtttagctttcatcctggttttctttcctgcacatctttgtcctcagttgtatatttttgaggaaattttcctctctacatttttgagagctgttctcagatcctaaccttctaactgcttggtggatttttaaaagcttaatatagaggaatgatttagtatatggatgggcttaagcattcatttttataaagtcctggacaaaaataatgatggtttttgtaccatgtatttgcagggtgtggtgtctatctgaagaatattttactttcaaaggaaagatgctgtctccaaatgataaaatgttaggaaaactggatccattttatcaaccttcagtgtccaagcagaagaccagtgcagaaatcataagtgaagcaagaaatgcattaagaacagttagaacccaaagaccatttacaccacaggaggctcaaagaaaactattcggacctgcatcctcaagaacatcagaaaatagacctccttcctccttcaggtatatggcatttcacattcatgttcattcagatatttaagcaccaggttataccttcccttaattctacttaaggttagcttttaaaaatagacttattttttagaacagttttaagttcacagcaaaattgagtggaaggtacagagatttcccatgtaccccctaccacaacacatctgcagcatctcattatgaccatcccccaccagagtggtacattggttaccatcgacgaacatactttgacacaccattatcactcaaaggctgtagttcacattggcgttcactcttggtgttgtacattttatgtgtttggacaaatttctgatgacatgtaaccactattatagtattatacagagtagtttcactgccctacaaattcttcactctgcttatttttcacttccttccctcatcccctagcaaccactgatctttttactgtctccatgattttgcctttgccagaatgtcatatagttggaatatacagtatgtcaccttttcagattggcttctttgacttagtaatatgcatttaagtttcctccatgatttctcatggcttgaatagctcatttctttttagtgctgaataatattccattgtctggatgtaccacagtttatctatccattcacctactgaaggacatctcatttgcttccatgttttggcaactacaaataaagctgctataaacatccatgtgtaagtttctgtgtggacataagttttctttctttttgtttttcttttttttttttttttgagatggtgtcttgctctgttgcccaggctggagtgcagtggcacgatctcagctcactgcaagctctgcctcccgggttcacgccattctcctgcctcagcctcccaagtagctgggactacaggcgcccgccaccaaacccagctaatttttttgtgtgtttttagtagagacggggtttcaccatgtttgccaggatggtcttgatctcctgacctcatgatccacccgcctctgcctcccaaagtgctgggattacaggcgtgagcgacctcgcccggccaagttttcaactcctttgggtaaacaccaaggagcatgattgctggatcatatgggaagattgcgtttagctttgtaagaaactgccaaactgtcttccaaaggggctatatcattttgccttcccaccagcaatgaatgagagatcctgttcctccacatcctagccagcattgacattgtcagtgttctagattttggccattcgaataagtgtgtagtggtatctcattgttttaagttactttccctggacatgtgatgtggagcatctttttatatacttattttacatatgtatgtcttctttggtcaggtgtctgttaaggtctgtggcccattttttaaatgggttgtttgtgttgttgaattttaagaattatttatgtattttggataacaattcattatcttacatgtcttttgcaaatgttgtctcctgctctgcagcttttcttcttcttctcttgatagtgtcttttgcagagcagaaaattttaattttaatgaagtcaagcttatcaattctttctttcatggatcttgcttttggtgttgtatattaaaagtcatcgcaatacgcaaggttttctagactttgtcctatgttatattttagagattttatagttttgtgttttacatttaggtctgtgatccattttgagttaatttttgtaaagggtgttaggtttgttttttgtttgtttttgtttttgtttttgcatgtagatgctagatgtccagttgtcccagcactgttttttttttctaggaatatgagccaaagttttacttgttaatttcttgcatttgaagtactctttgataacatccttggcttgagacttttcccatagtcctaccacacaactacaaccaaccattttatggggtttccctctctgtcagttttacagagacctacccattaccctagtttcttgtcatcaaccttaattaggtggatttggtgttcagctcaaagggcctccatcaatttgacatacacaggctcatcacagttagatgaaagccacaaagatgggcttggctcttgtctgacgctttgacagcttcgcaaattccttgtgctaggctgacctggatgagagtggtcttcagcacctcttttaaagcagtattaacatccactgcacctccagcagcagtgtcttcctcagccatggcaatgggttatgagggaaggtggatcttgaatacactgagcctccacctcagcgaaagagcccagcaccattttttgaagaagctatgttttctccattgtattgcctttgctcctttgtcaaatatcagttgactgtatttatgtcagtctagttttgtgccctctattctgttccattgatctgtttgtcttttctttcaccagtactatactgtctttattattgtagctttataatatgtcttaaagtcagggagtgtcagcccttttaatttgttcttcttgttcaacattgtgttggctagtctgggtcttttgtctctccatagaaactttagaatcagtttgtcaatgtctacaaaatgacttgccaggattttgactgcgattgcattgaatctatagatcaagttgggaagaactgacatattgacaatattgagtcttcctagccatgaaaatggacgatctcttcatttatttagttttttgatttctttcactgagttttatagctttcctcatctagattttatccatatcttgttagatttataactaaatatttagtttttggagtgctaatataaatgataatgtgttttcatttcagtttccaaccttgtatcttgcaaccctactataatcacttattagttcctggagctttttgtcagctctttaggattttctacatagataatcctgttatctggaaagagttgtttcttccgtcccaatctgtatgcttttaatttctttttcttgtcttattgcattagctgggatgttctgtatgatactgaaaagcagtagtaagaggggacatccttgccttcttcctcatcttagtgggaaaactcttatcataaaatatgatgttagctgtaggtttcttgtagatattcttagaagttttcttctattcccagtttgctaagaatttttattatgaatgagtgttggattttgccaaatgctttttctgtatctgctgatatgtattctctttagcttgtattttctgtatcttctttagcttgtggtgtgatagattacattgattgattttcaaggtagttgtctttttaaatttgacttttgttcaaaattcctaaaagtaattacaaacattggttcaggaagttactttggaatgaaatggttactagcagttgtcccataccagctttataaagtgatatgaacaaagctttttaaaaaattactctatacacttcttcttttcattattcagtattttttaaacttcctaaaagtaatcaaaagacttgttaatcaactgttttaagtacaataacatgaaaaaatgtttttcctcatggtttatgcattgcatccttttacttgttttttagctagggttaactaatatatactataaataaagaaataattcttcacaaactaacactctgcaccatcttttatgctagcctccatgcatccagttttgagtcatctgattccaggcctatctctggcacacgtcttagtccactagagctggtgagtactttgtataaccaccagtaatttatattatgttgtgaaatgaaattggccaaaaacacttggaatcagtacttatatatgctatgataattatcatgtacacctaaatagactaataatttaatatgaaaacagattcttttatattgttcaaatgtaatgggtaatatctaatgaaatacttctataatttacctatagtttgataataaagaagaatttttaaaatatataataacttggtaagcaatatttcacaatatttttgctttcttagttatacatatgtattattttcttaacagttatatatacaaaaattagatgtataatttatattaaagttatatatcttatacatatataaaaatcatatatatttatatgtagtctctctatatatacatttacatataaatatatgtattcaaagatttattacaaaaaaactaacaaaaatccaatggtctcctgtccccttgttcttcattgttccctcctcagtggctttcactttaagctctttcgacacatccttttaggttttacatccagacttcccaatgccacactgtcttgctgctttctgacttatgagcttgaggaattatctaatgacttctaaggaagatgaagatttagtttctgtctgtctttttgcctcttatcacaatgcgttcaccttttctatccccactattactcccatatagatataactttggttagatctgttttctctgactgtgattacataaaccctgttcatagctgagacttgaattaatgataaattctcctttcctgtaccactttttgttttccctggcattaataattgccttacttttaaagttttgtattattagtatttcaaccccaaactcttccccagtggccttaatcaccttctatgttcaggcacatgaggcattctatggatttacctccttggagaactcttcacacgtcctgcccaaccactttccctgagcacctggtgcacagctctcctggggtgcccctcaccatcctcctggggagacggcttctccttgtgctggctttttcgtggttcttatgtctcaagtcctctttcttgatttactgtggatttggtagagcattccctcctatagtttcttgagaaagggtacatgggaagtaaattatttgaaaccttgattcctgttttttcttctctggaagtttgtaggatgtttctctttgtttctagtgttctgaaatttaataacaatggtcctttgtgtgagtctatttttatcaatcatgctgggtacttgaagggccctttcaatgtggaatttcatgcctttcagtaaacatggatattaattgaatatttaatatcatcatagtgtcttacccacttttttgttctgtttgctctttctagaatttattattcagatgtaggacttcctggctgggcgtggtggctcacgcctgtaatcccagtgctttggcggacccaggcaggcagatcacctggggtccggagttcgagaccatcctgaccaacatggtgaaaccctgtctctactaaaaatacaaaattagctgggcatggtggtgcatgtttgcaatcccagccactagggaagctgagacaagagaattgcttgaactcgggagatggaggttgtagtgagttgagattgcaccattgcactccagcctgggcgacaagagtgaaactctgtcttaaaaaaaaaaaaaaaaaagatgtaggactttctggactgacacttcagttttcttattttctctcttttctgttttacatctttttgtggaagagactgtattctgatccctttattgagtttttttttcatttctgctgtcatatttttaattttcaaaagtttttttccctctacattatctctttgtatagtagtctgttcttatttcatggttgtagcatgttatctgagtatattagtggtagttttgattttttaactaagttttcttctccctttatagtctctgttgcatttttgtctctgctttttacactagagacttcctctgatgcctcatgctgtttgtttggctgttcttaagagtagtggcagccaggcgcggtggctcatgcctgtaatcccagcactttgggaggttgaggcgggtgggtcacgaggtcaggagaccgagaccatcctgcctaacacggtgaaacccagtctctactaaaaatacaaaaaattagccgagtgtggtggcaggtgcctgtagtcccagctactcaggagactgaggcaggagaatggcttgaactggggaggcggagcttgcagtgagccgagttcgcgccactgcactccagcctgggcgacagagcaagactccatctcaaaaaaaaaaaaaaaaaaaagagtagtggcatgtggattgaggttggtcaacctataggtggtatctacccacacctgtagttagggggatctgactgggctgtgttgttgatgacaccccagtggcagtatctttaggacttttcttatgggctagttatattctctgtaaagaagtatcttccacgctgtttcctggatgttaaagtctggttgctagcttccaggtgcaggaagaaggtgagaatgcccagcatttaggatataaatattcaattaacatccatgtttataataagtactctgacctcaacaataagggtacttacagtaatagtacccttacttattgacctcaattaaggaagaccctctgttttaccttctttagagaataaacccatcttcttctggctttggtagcctgactgcatggagctgggaaggatggaattacacagaatttcagctaatcctccttactttagccactccttcccttctacctctgctaccaaaagtacttggtgataccagttccctaggctttatgagattggtatgttagtcaagcgcttctcaatttctgttactctgtgtttgtgtgtatgtgtgtttgtatgtgtgtgtgcgtgcacacgcatgtgcttgtatgtatgtttgttttggatgaaccatttgaaagtaagttgcagacattgtgatacttcatccacaaaaatttaagtgtgcatctcatatgaacaaggacagtctcctacataaccatgataccatcatcatagctcagaaaattaacattactcagtaatatcatttaatgtatagtccatgtccaaatgaccccaattgcctcaaaatgtatcttatatttttaaagtatttatcagaatgcctctgtgaggaagattatacttgttcatgtattgcagatgacaaaaacaagatcccaagatagcaagcacgaaccaatattgcaagaaataatttgccagctattgttgacacatggcttgttaacgtctacaaccttgggaaccacttgggttttgagccagctacagcctgaggacccagttcggcagctcggtggctctaccttattgtagagtggctctttattctatgattctgttgtttgactcctgtaaattgcttttaatattactgtagttttttggggactcactcagtttgggactcagtttgggtttacccttcccttaaaaagaatctcattttctagagataacctggtccttgtcaaactggtacagttcttggactgcagaattagctattgggctaagacaagataggcatttatctgtttagggtcattgaacttaaatttccatacctctgaatggttgggtgctatgttcacagtaaaagtagacggctaggctcagtggctcatgcatgtgatcccagcattttgggaggctgaagtgggcagatcacctgagatcatgagttcgagaccagcctggccaacatggtgaaaccccgtctctactaaaaatataaacattagccaggtgtggtggcgcatgcctctaaccccagctactctggaggctgaggcaggagaatcactttaacccagcaggcagaggttgcagtgagccaagattgtgccactgcactccaacctgggtaatagagtgagactcatctcaaaaaaaaaaaaaaaaaaaaaaaaacaaacaaaaccaaaaagcaaagtaaaagtagtctaagaagttcccattttaaggaaagtgactgcttaatttgagattgtggtcgttgatgttattgtggattatgtgagggtcttaagtacatttcattttaaatagtaattaaaatttggggcccccagtcaaaaaattctgaaaatgtccccatgctacctgaccttccaccttttttcttctttatcacttcatttttttaaagaactctttgcctctgataaccactaaattggcaaagggcagagataggggaagggagagggagtggagagaaggagataactggagagagagggagagagagtggcagaggagtgtctcacagttaagggacacatttgctgaaagagtttgtgaggacctaaccagttgaatctcagtgctttttggatctaggacacttttcagaccagtttgccttttaacaagtcctccaccagcagtcagtcagggaacagggactcagacagcagcctttcagctcctacattgagcagattagctcaatgctgcttttgtacagctgccctctctctttctccccatcctatctggcatgtgctccccactcaccctccagcgggcaatgggctgcccacactcaggactgcccagtgcttctgagaagaggaagagctgacgcttgtggttcctgattgctcaggccctgccctccagcccgacttgcccagggggttcctgttagcagaaacactctgatttgtagggttttgtttgtttgtttgttttgttttttctgagacagagtctcgctctgtcacccaggctggagttcaatgacatgatcttggctcagtacaggtgtgcaccaccacacctggctaatttttgtaattttagtagagattgggtttcatcatgttggccaggctggtctcaaacccctggcctcaagtgatccccccaccttggcctcctagagtgctgggactacaggcatgaaccaccatgtccgcctgatttgttgtctttcattaacgtttatatctacctgctatataggtgtgccagtttacgtcttttttccttcttagcagctcccagctgctccacaagagcactgagacctggggcagttgggtgatagttactccatttttcttctactctagttagatggtgttcaaatttcgttcacacagagataactgctctcttgctttgaattgtataaagtcagaaaagaggtgtgaccatgtgaatacacaggaagtgttgtctttcatcattattttagtcaacaaaatagaattttcttggtttcctaaacttaccgagtccagtgatgtaaaccccaaatgttttcgttcaactttttattgacacagaagaattcagcttgatacatttacacaaactaaacacactcagtaaccagcattcaaaaggaaaaaatagatcgctgccaacatcatcaaattgatcatttctgggctcagaatccgccaccatggcccctctcagccactgcctcctctgggcaactaccagccccacttctaacagcgtggattagtttgagccacataactgagctccaggtaattgataagtgaaacaaaatttaatatttttaaaagaaagggacctaggaactcatataaaccttggggatgggcgatccagggtaagacaagtagagtagagccaaagcagtgttttttctttcacaattgctgaagcaaacagtgacattacaacagtgagtcacatgccaagagtgacagaggaccccagtgtacctgtggagaaaatcatagttaatagaaatgcacacagaactgccgcgtcacaaaggttctgtgcttgtgtgatttttttttcttttctttttttttttttttgagatggagtcttgctctgtcaccaggctggagtgcagtggcatgatctcagctcactgcaaccattgcctcccgggttcaagtgattctcctgcctcagcctcccaagtagctgggactacaggcgcccaccaccatgcccagctaatttttatatttttagtagagacggggtttcaccatgttggccagaatggtctcgatctcttgaccttgtgatccacctgccttggcctcccaaagtgctgggattacaggcatgagccaccacgcctggcggcttgcgagaatgtttaatatttgctttctgactttcaaggtgtcttttgttgcgtgtgtgtgtttgtgtgtgtgtgttctgctgctttacagattaaattgtgagcacctttctggggtgagatgtcctgaactcccttttccagttgtcacataggatcgggggagaccctgttgggtgatctggaagagccagggcagaaattggccaaggtgacggtgcttggaagaattgtggtcagcctgatggataccttaaacgttctatgtattgtgtcttctttgacggggttgtcctatggaaatagactgtgtgtcctcaatggactctaacaggtccaccagccagaacagaccttaaaatatgactgtgtctgtgtccttgattatactcaagtcatgggttagtgtcaggaaacaaaatgtgaggtagttaatattctcaagtgaattttttttttttttttttttgagacagagtctccctctgtcacctgggctggagtgcagtggtgcaacctccacctcccaggttcaagcaattctcctgcctcagcctcttgagtagttgggactacaggcatgcacaaccatgcctgggtaatttttgtatttttagtagagatggggtttcatcatgttggctaggctggtcttgaactcctgacctcaggtgatccccccgcctcagcctcccaaagtgctgggattacaggcatgagccaccgcacctagccctcaggtgaaaatttaaacttacttgcaacattttctgatttctaaaattattcaaattttataagagaaacatgtttgctgtttttctttataaaagtcattttactccacagcgtgaaagaacattttgtagaacttggcataaaagaaattgctgagtcatttagttgttttctcttaaagaattaaaaatgctttacatatgtcactttatattctaagtagtcccatgagatgcgtgtttaaatgggacacataatttattaaatgtcagtagtaaaatggaaccgaatttttattatatacagttactaattttgcactaagaaaataatgccttttattgaggagcatttgtgggactttgctcttgccctgcagagaaaattcggtgactctcttttggggaaatttgctttccaaaccatattttcactctttataaaatcttttggctgagtgtggtagctcatgcctgtaattccagcactttgggaggccaaggcaggagagcttttgagctcaggagtttgagaccagcctgggccacatagggagaccctgtctctacaaaaaataaaaaattagctgggtgtggtggtgcatgcttgtagtcccagctactcaggaggctgaggctggagaattgcatgagaccaggaagtcaaggctgtggtgagccatgatcgtaccactgcactccagcctgggtgacagaatgagaccctgtcttaaaaaaaaaaaaaaaaaaaaaagatctctcatttagtacagtttgggtgtctgtagaaggagctgtttactttgtctgcatgattgttagttgacagatttcttgatctttgtttcagtttcagggtacctgcagaatacagacattttgagttaagaaaaccacacgtctatcttcaaaattgagattaccctctatatttcatttttcataattgcacagaaaacacctattttcctgtattacagtcttagcttttctgttcctattagcttcatggcctaagtaacattcctatgattattttgcaacaaagtggggaggctaaaaagtaaagtgattacttgttaaacaaatatagtgcaacttatgcagacaaacaagtgttacctccttcagaacagacccctcagaatccaatatcttaattctaacaagcctgcgtcagaggctagggccttgactatgagaggagttaaaagtaacttggaaccaaacctgataaataaggggtgagcaacttacatggggaagggaactggcatttcttgagcttccataataggaattgtgtttatgggaatggccctgtaagaaggagactactgtctctgtgttatagctgggcagtttcagagaagtaaatggcctgcacaagttcacataactagtgagtgggtccttctccaggtctccaaaagtgatttatgctttcttccatattatgatgattattttatttactgtttttttctaactgtgttagaaaaatgtgtctttaatatcatagaacaatttttttggtctggtttataaatcgatcctaaatacaaatgaacaagaggaaataaacattttgaagaatgtcatcattattgaaatgaacaacttcttggaaggaacaccctaatatagatgtctatgttctattcatgtatgtgggaaaacaagtgtttgggattatgcgtcatacgtgataaatgacatcacccaattttccaaattatatgacttgaatttcacactggatgtttcaaaaatttgttgattaacttattggatagtgactcactcattcacatgttatagaagtgactttaggaatgttaacttgattatttttggttagagctaaaaacacttgctgccataaggttgttctttcataggcaaataactgtgctgacattggaggcaggaaggataagaccaccaggcaactgtaaaactaggagctgagtcaccctgtgagggtctggcatcaggtcggaggccactcagattagagggagttctgggtggcacagaacttggtgcaggtgttttttttaaagtttttaaggaattagaattttgttagtaatgttcctctactaagagtatcagcatcgacacttaagaaaagatgggggaaaaaatagggagtatcagcatagaatttctgagatgtaaaaaataaaacattttcggctgggcacagtggctcacggctgtaatcccagcactttgggaggccaaggcaggtggctcacctgaggtcaggagttcgcgaccagtctgactaacagggtgaaaccctgtctctactaaatacaaaaaaaaaaattagccaagtgtgctggtgcatgcctgtaatccgaactacttgggaggctgagaccggagaatcgcttgaacctgggaggcggaggttgcggtgagccaagatcgtgccattgcactccagcctgggcaacaagagtgaaacttcatctcaaaaaaaaaaaaagttagctgggtgtggtggcaagctcctttaatcgtagctactcgggagctgaggccggagaatcacttgaatccggaaggcggaggttgcagtgagccgagatcgcaccattgcactccagcctgggtgacaagagtgaaactccatctcaaaataaataaataaatcaataaatagaaacaaaacactttcataagtccaagacaactttttgcttttatgttttatgacttttccacctaacttatttaaaaattttgatatcattaaaaaaatacatttgtggcatccaaaatatgtaaatgtaccacttacattccacataattcttggtacatgtaggtactcaacaaatgttttctgaactgaattgaactcagaaatttttaaagcatgttgaatatgctatatgtaattttgtagtctttttttatttgggggtgggggggcgggatggagtcttgctctgtcacccaggctggagtgcagtggtgcagtcttggctcactgcaacctccaactcctgggttcaagcaattctcctgcctcagcctactgagtagctgggactacaagcatgcgccaccatgcccagcctatttttgtatttttagtggagatggggtttcaccatattggtaaggctggtcttgaactcctgacctcaagtgatccagctgcctcggcctcccaaagtgctgggattgcaggcatgagccactgcgcccggccaattttgtagtcttttatacagataatatctgtttgctagcatgggtaaactgttttactcaagtatggtaatagcacagcagagtagttaatacaatatgattaagaaaaacaattaaaaagtgctttatgtatacatatatcacattatgtaagatgggccagtgagttggtagaatcaggaagccaagatgaaggcaggcagataggccttgtgctcttctggaagggttgtggccagctctgaggtaagtgttatttgagacgcagaaagtcattccagttatttaaaaaaatctctttccagaaaccgaaagttccagcatctcccaccagagaggaggattcctgcttttcctttcctaagcccccagtggaccctgcgaagattagaagagtaagcaacgccagggctcgcttattcagggctgcctcccagcgggcccttctgccggacagatcccttcctccctccgactgtaaggccatgtaacatcctgtaatctctggggacaggcatgcttcttgaatttgcacacaaaagctatttttatatgatttttcctaaccctggatgatttttatattaactaagattagttaatattgggcaaaagctggctaagaaacattgttcatatatttttctgggtgcttataaggaatacctaaatattacagttggtaggaaaaggaaattaggataagtgactgggcgcggtggctcatgcctgtaatcccagcactttgggaggccaaagcggccagatcacctgagatgaggagttcgagaccagcctggccaacatggtaaaaccctgtctctactaaaaatacaaaacttagctgggtgtggtggcacgtgcctgtaatcccagctactcgggaggctgaggcaggagaagtgcttgaaaccaggaggtggaggttgcagtgagctgagatcgtgccactgcaccccagcgtgggtgacgagcaagactgtctcaacaaaaaagaaaaaaaagaatattaggataagtattccctagtggatggttcatgtatattagaaataaatgatttttaaattagagttcaaaaagttgttaattttattagaaattaatgaaaatgataagattcttataatgcacattaagcttatttctttgagaatgcccttctgatcccgtgtgagcatgtaagcaaaatttgaatgggacttctactgcctgagaattgctgccaggcacctaaacctgggaacagagaggctaaagatcacagcctgaggagtcccaccaacaattggaatcactccccatccagggcatactaagggtttctcaaactgtggaaaaggacccagaagtgggatgacaatcaatttagtggatcacaccagcatttttaaaaaatgaagtagaatagaatataatagaaaatgtcagaatacatgacacacgataggggtaagtattgcttcaagagactttacttcggtcttcagtgtgtgttcagggtcatattacaaactgatttctgactgtgtgtggtcaaaaaaagtggaaaccactttaccaggagctgacagaactggttctccctccatcaacaagatttgatgaagagagataggcttacagtcacagagaattggggagagcctggaagatacataccaaagatcacagcccccacctgagcatcatacttgacagacaagtatttttttttaattcatttccaacatttaaaaggtagaagaatctcatggaagaatccagatttatgacttcttgtgaaaaatcagaaaatctggcaacactgggtccccattccatgcagccacaatggggcatgatcggagctgagtggtacctccattctgtggccaggatatgatctgcagtcaccatgtccccagcctgtgccattcacttgcctgtgtggtccctgatgtggctgaagagttagaataaaggagaaaaagaaagaaagagagagagaaagagagagacagaaagagaaaggaaggtaggaaggaaggaaggaagagagggaaggagagagggaaggaggaaaggaaagaaaaaaggaaagaaggaaagaaaaagaagagagggagggaggaaggaaggaagaaaagagaagagaaaagacaagacaatgaggatgtgcagggtgtgtacctcatgctgtgatgccgtgaccaagtagatcatcaggcaacttgctttaccttgatgtcccgatttgtttcctttcttacactgccagtcgatctgatatttatcaaactcctactaagtgccaggcaccattctaggccaacaaagttctgtcctcagagagcttacaatctagtgagaggagatagacaatgacaggagaacaaataagtaagagaatttgagtgctgatgaatgctctgaagaagataaacaagataatggactcgagagtgactgtggtggggtaatttgctttagctcaggtggctctgaaaggtatctttgaggagctggcagctgaataggaaggtgactcatgagaaggaggcagccatgtaaaaatccatggaccaagtgtccacatggaaggaaaagcgagtgcaatgaccgggcacgagagcaagtgctggtggtggaggacctggaggtccagtggctggaaagtggctgatcaagggaagttggagagagctgaggccacagaactgcccagggcctcagaatatggaaaacacacccagctgtgttttacttgtagtgaaaagatagggtttaccaaagggagagacaatgtgatgtaggttttttcaccaacagcagttctcagctgtagctgcccatgagaatcacctgaggagcttttcaaacgctccccccgcaacccgagtcccgtgtcagctcaggtaaatcagaaagggttggtaattgcaggaacaaagggtttgccaagatgagaggggctgggacctggaggtgaagggcacttcttatgaacaggatggcaggattggtgcaaggactcataccttgttttttattctgtgttcttgcttgtgaggttgaatactgtgtgtttcatgtatttttaacttttgggagtgcacgctagaaaaccctgctgcttgctgaggtacacactgatgtgaaagtgaccacagagatgaatgctttgcccaccatccccctcctcagtgcttccccagtggcttagctccttccccgctggggtacctgcctgttgtctgcatgctctgggaggtgccctctgcagctgtgatttcccagcactgaggccagcttcacacctccaaggtgcactgaagcatgttttcatcgtggttcttttatccaccctgtttgcagtcacccctcttcaccattcaggtcatccctgaggtctgggccagcattcaggaaatactggcagcaaaaagtcattgttattttaaaagcacatgtcatccaattataaagttataaaaaatatttgagctctccagccttggaatcattgtcatttgtataagagctccctgggtttcatttcagatcttctctattgtttagaagaggtaggctttgtggagtaactgaggctgcagaaatggagggcatccctttgtttgctgtgaagtcatttgtggctgatgctaccccacaggcagggccggggtgtggtggcaggtttggaattcctgcttcaagacagtgaaagaggaagagatttgtgtagtcatctccaaaaggccagcagtataactgctttgcgttcacacagggtttttggctggaggtggcactgctgtgaatgcttccccagttattcaagccagacaagaggcctgagagcagtaccacctcctcagccatccctgtcacactctccgtcaccaagccctacacgtgcttcctgactagctctcaagtctgcattctccctcaccaccgccatgctgcctccatccctcttgcctcatcctgttttgctgctcttaaaccaccgtctgctcactggggtgctgtgatggtctgcaggtgggtggatgcgaggccctcagccagaggaacagccagtggagcctgaggatgctgagctcccaacacgacatggctgtgagcagcagccttatccctttatcccaggggaccatgaaaaatgatcattttctgtgtgttccataaagcacaagaggtcgggaagcaaataaagatcagattgcaccaccctcttgctgaaaacccttcagaggccctgttgtgcctacagaagtgtttgctaaactgagttccagggaactccagggaacacttttggcaaaatgttaatagcttctctttggaaaaagggttcagtgctcaaataggtcagggaaacactgcctacccctcatcttcttggagagtctctgcacatgagcgtattaaagtgttggtggagaaatctgtttaattttaattcaacacagcatttcacaaacctgctggactgtgggatctgtcttttgggaacacaatttgggaaacactagcctactgtagaagttggcaaactttttctgtaaagggccagatagtcaatattttagacctggtccttatggtctctgctcagcctcctccgttttgtattgtagcatggaagcagccatccaccaatttatggccactgaaacttgaatttcatgtaattttcacttgtcacaaaatattgttctttctttgattttttttctaaccatttaaaaatacaaaaaccgttcttagtttgcaggctatacgaaaatgagatagggcagatttggtggggtttgtagtttgctgagctctggtgggggtggcgggggatgacatcccagcacctccaagtgcacagctgtgttgtgatccagccccagcgtaacattccaggccctgctcacgcctgtcctgggcctgccccctcacggtgggtgcaccggcagggtggaaccccttgttgttcaccacacccaccctgctgtttcaagcctcagggagaacctatgtaatttgctgggcccaatgctgaatggaaatgtggggccctttgttcaaaaattattaagagtttcaagatagccacagcagagccttaaaacaagtataggcccttctaaaactggggccctgcctgactgtactggcaatacacacttgaagctggctttcactccagacttttgttctcttttcttcaagctgtttacgtcttattaaccattcaaaatgcttctcagcccccacctcctctgtgaagctttctctgaccaactcccaacccctcaagctttctccactctctctgccccctccttacctggctggggtcacactgggcttcatttatctctttacacatctgccccctttgtctcccctgctagatagagcaacgtcattaagaaaagtgtttttctctgtttgttgcccaagagcctattacagggtgtggtatataacaggtatcaaataaatatttgtaaacctgaactggtcctgtgtggtaaggctgctgggagctgtctccttttgaagtttacccacgatccattacaaaattcatataatgtgctgcaactgtctaccgagaagatacagaccatagttacacatgctcagtttcatcgaggacattcatcaggaatgagagtgagccccccagggcagctcttcgttgtagtaatacctgacaagcttactccagtagatttgaagatagacaggtatagctccttgacctataggtatggttgggtttcccttctagaagctccatgatggctgggacttgttcaccatggcttcacccgtgcagtaaatagcacctggcacatagtcgtgggtgcttaataaatattcagggagtgaatgaatgagagaaacgaatgctaaaagataacggtaggctaaaaatactttgtaatcggaaacagaatgtgtgcttcataattcagtagtaaagtcatttaaggtggtgtggtgatatggagagagccctagcccagaagtcaggattcttgggttccaataatcatgacaataacttctaggttttgagcgtgctagcaccatgtaagtcactttactaggccacatcatttaaaatctcaccacatccccaagaggtggggaccatggaaggtggtgtgaattgagcatccacatcacagagtgggtgccccggggggcctgcactcgaacccaagtctgagccaaagcctgtgttcttcccaccctgtggtcctggctctccctgtgaccttagacaggacatttaatctttgggttctcaattttctcatcttaaaaaaaaaaaaaagaagcctagaatctctaaggttcctttcagttttaaaatttagcgttttgaaagcagggagtttggtcagaggggtagaataggtggttttgttattattagtttttattggtttgttggtttcttagtaagtacagaaaaggaaaggaaaccttgagtcattttgaaaaatcttgcaaaacagtaagtatttttctacatgcagctcatccccacccccgcacactgtattatgggagatttactctcttcccctttaacaaaatgttttctcacagactacagccttgtagcagcatggacaataagctattcctaataccaatttgctgataagggaaatgttatattattatatgtctaagaatctgcagtcatgagcaaaaaggatatcttcttgcaactctgtcttatacctctttagaggtatgtttcaatgccctctcctttccattgcagagtagtgtggtctactaggctgggcctccacaatccacccctcacccctctaatcacctctcctcctctttgcctccttgcacactgcattcctgctattccttgagcaccccaggcacagtgggtgctgaagagtcccccacttcagcctaccttagagcctccataccagctggtctctgtgctgaaaatactggccctggtggctggatgcctcactccataaagggtttgtcctccctaccctgctgtacccaccctattcccaatccccttgagccttccctacttttatactttgctttttttccatagcacttattatcttataacatgtcgtataccttatttattatggttattgcttattttctgttgattaggttgtaagccctgtgagatcagagatctattttgatgcacaccaagtacctaggacagtgtttgacatgggggagccactcagtaaatattttttgaatgaaaaattatgtgatcaaattcaggaggaagagctgctgttatgggacacggaagtacttatgtggactaggtagtttatgagcctgaagttgcgtgtttgccttcaagtagactctaagctggtagagataagattctatacatttttacctgcagaattgatggtgccagacttaagatactggtcttgtgtatgctcagaaaggctttggccataaaattccagacttaattataagcaatgtataacttttaaatcatataaattcttagattgaaaaataacattgaaaggtagtgattcctaaaataagaatacttcaacaaaatattttcttggttatattgcagcaaagaagacagtggaatccaaagaaacagttatgatgggggactctatggtgaaaataaatgggatttatttaacaaaatcaaatgctatttgccacttaaagagtcacccacttcagctaactgatgatggaggcttcagtgaaataaaggagcaagaaatgttcaaaggaacaacatctttaccatctcatctcaagaatggagggtcagtattctttttatttaattttctggtcaggataatggtatcatttaccagtttcttctctattttatatagatgattggtttgctttttctcttttatgtaagcaaattttatgttaagggtacatgaataggagagactacttctcatggccaaatggagttgatttttgtatcattccttatataatactcaagaacacttttattcatgactgtcaaagtgctgcttctgtaggactatcagaataagatttagttggactattccagccatcccttgagtgatgactgatcattccgtttgtatgttatttgggattcttgcatggcctggaatctcctattatctccctttgggttagttcacagtccttaactccacaagagtggacacttattttattcttcagtagatcttggattaaatatttattttgcaaactaatggctaaaacagaagagtcctgtagatttcagttatctgtgagatccctccattggcccctcataaatgaatgattgggaattgctttatttcataccatgttcctagatagggtttccttgagaatcaatcttcctaccatattaaggatctgtggagaaatgcttgctgtttggactgtgaattcttaccctggtattttactgaagaaaccttgagtatttggtggctggaatgggggaaacagtggagagaacaggctctgttttccagtcccagccagtaatgatgctaagagaggcagaatgtcttgaactggacaaggtcactcagtttaagatatttttttctaggactttccattgggtcatcatggataactgcccggttcagatttgcttaacaagattaaattccatgggccattttaagatcaagtatttcttacactcacgttagatttcgggtctgactttggcttggacacatgtagcatgcttaaaacttttcccccaagtggctgcttgccagcttgtttagctgaaccgaccttgtctgctgacacagcctgaagagtgtcacacatacggaatttatattaagcaatctagtagtccttgtaatgtcatttcacattcagaacatttttttaaattaaaggaaaaatgaaatgtctccttaagtggaagagaacgacttcaaattgggactttgggagttgagtagaaaacatcaaactggccattgcagacaaatcgtttccagttggtgaataagaataggctgtggacctcagagcttaaacataaaaggcagcaggaaaacttgtgtttctttcagtactgaagtaaaaaggaaacatttatcttgctgcatccatccttacagtaatgaaagttgactagaaaaaccagacaagagctatttaatttgtttatttgcaaaccttcagatgtggcagaataatctggaaagccagagttcattatgtcttcctcattctgggacagcaggggcattttcatttatatattttatcccacaaacagcaaaagacaaatcagttagcacttcttcctcactgtccaaaattatgaggcattggcaatagcactaattgttttctttgtgttttgttaggacggcttttgcatcatataaggattgtgtctaagttgggtttgcaatgtaccctggcaaggttaactttcagtaacattttttgctttatgaatctttacctcctttaatcgttgggtggaattttattggagtggtgccaaaaaaaagtttacgtagtaggattaaaataaaccaaaaaacagaaactcttagcaattctttcattaatgatgttaatgaatcagtctgggacacttgataattgtttcttgtaaacatttaagtgactaattccaagaaatgatctttgctatgcagtggagtattcccagttttgatggtagagcccttccctcaattaacattttttcatctttagaccataaagtggcaattgtcagtgagctgggctggcaggagcagggagggttgagaaggagtgtgtaagtagaccgtggaaaggggagagagtgggtgaggccacactcccagtgtgggggccttgcaggcttgtccagtgtgacagcggtcacctgtgtggtgtgtgtttatctggctgggagaggaaggagcattttgtttccatgaaactgcaataattgtataccctcatttataatatggataattcagatattgatggaatatctgaatatggatggaatggagttcaactttatgctggttatggtggaaaaaggatttgctaaacaaagtatcattgtaaacaatgctttagaggactatttaactttacaaaagagaacacactgtcaagcacttacggaactgtcatcctcaaaccttgtgtcagttatgatagtctccatatgcccatttagggattcatttaaggtctggcagacttgctcctcaggaatacttcaccatcacttgctttgtattactatatggattgaaagtaatgcagctgccattaacaaaatgtgtgtattctccatccatccatccacccattcacccatctacctatccagccatcgacatatctacccatacatccacccagacacccattcatccacccatccaactgtccattcatccatccatccacatacccatccacctgtccatctacccattcacccatctactcatccactcatctgcccatccacccacccatccgtctacctacccacccatctgtcatccacccatccattcatccatccatccatccatccgctcatctatatatctacccatctatccacccattcacccatccacccacctatccacctatccatctgtctacccatccacccatccatatatctccccatccatccacccattcacccatccatccacctgtctacccatccattcatccatccatctatccatccatctacccatccacccatccatatatctacccatctgtctacccatgcagctagcacctacccatccacctatccacccatccattcatccatccatatacccatctacccattcatccacccatccacctatccatgcacccattcacccatcccccatccatccacccatttatccattcatccatctattcattaacctatccacccacccatctacccatctatccatccacccacccacccacccacccacgcagtcatccatctatctattcacccacctgttcgtccatccatccatccatccatccatccatggaatctctttcaaagcagatgaatctctttacctgcttaaaaaatctgttaaggctttccatgtaaacgttcaaactatcatggtttggaaatgggatctttaggaggaaagcccaagaacagccagttgttatggagaatcagggactgttcctgaggagccagaatctctggatttaggtttggttctctctcagccacttgatttagctgtatttggcaagtatcttaacactttcaggggctcagttttctaatgtataaaatggaaataactctgctcttttactcccatctccttctagccctcactgtagattgtggaatgatgactaaggcttgaaagccttactaataaactatcgagtgctcttagtattgttggaatcaaaaataagaaaagagggcttctggttaaaggcacaaaggcattctccagtaatccaatgaaagcagcaaagaatgaaaaacagagaagtaaatttcatcaatgaaacaacaacaaaaaaatggctacgaccctgaactacacaacatgaagcaaactttacactgcagtataggcttgatttttgttggtctgtctagcaaacaggccttctcacattgtgtaataaatgctgctcagtccgtatttggagaagggttagccctgtcttccctgtgtccctcccaggggtggttatgtggcccagggctggctaatcagagtttgccaaccccagctacagcagttgattcagagatgggcacatgatccaagccaggccagttgcattccttcatgggactttcaccaaggcctttggggaaagtgctctttctccaggttcacaaactataaagatgatgtggtcttggagctgacagtggccttttcacagccttatggagagagatgctgagagggaagtggtacataaacaaaaagagcaaggaacgaagataatgatcaagttcgaggatgacatataaacctctagatccagctgtgcctgaagccaccacatcaacattgtagaatactgttttgtgaaccaatgtgttcctttttctttctccttccttcctttctttttcttctctccttccttccttcccccttccctctccctcttctccttccttccttccccctttccgttcccttccctctccttccttccttccttcctctctctttctttcttcctgtgttcccttttctcttttctccctccttccttccttcctttttttctcttttttttctttttttgacagagtctagctctattgtcaggatggagtgcagtggcacaatcttggctcactgcaacctccgcctccctggttcaagcgattctcctgcctcagcctgccctgtagctgggattacaggcatgtgccaccacgccaagctaatttttgtatttttagtagagatggggtttcaccatgttggccaggatggtcttgatctcctgaccttgtgatctgcccacctcagcctcccaaagtactgagattacaggcgtgagccaccgtggctggcttgctttcttttctttttcttttttttttctttctttctttctttgtttctttctttcctttcttttctttctttctgtctttctctttctttttcttttctttcttctttcttttcttctctccctcccctcccctcccctccccttccttccttccttccttcttccttccactccttccttccttccttccaacagggacggtttatggtactttagattaggttttgttacttggaacattgcattcataagaatctagttaaccttccaggccctaagaaatctagattataacaaggggtaatttgaaagtggacacataccttctcagaccttgagcaagaaacagatttcactaaaagtgagtcttttaattcagaaagatgtactcaatatttaattaaagatatgagatctaacgatgtaggcaggctgcaggagcagggagtatgccctgtgtaaggactccattcaagatccagatcaagaagtgagggggaagatggagctgaggatgacacacactcctggttacatgtgagccagctagtttgtgtgtgtgtgtgttttgggggaggggcttgatacattagaatttaaggaacccagcatgtgaaagggcttttgtgtgcatcacagcgacctgctccacacaaaccaagggaacatatactcccaggtcagcaaaggtaatggatttggtgattgcaagtttaagaaaacagactaaaatttaagctacagaatacctccgttcgctctctctatggatccttattcagcgttaataaataaatggctctgtttaaagataaatactattaagataggaaccaacgtgggacttgagcttagatatataaggaacatagcaaaaaaaagatgaaggaagtggatcacagaaggtattaccttccaaaaacatggaaagagttcaaacaattttccatagtctcagagaaattatagataatgtgatcattctcttaaaaaaaaaaaagaaagggttcaggcatggtggctcacgcctgtaatcccaacactttgggaggccgaggcgggcagatcatgaggtcaggagatcaagaccatcctggctaacatggtgaaaccctgtctctactaaaaatacaaaaaaaaattagctgggcatagtgacaggcacctgtagtcccagctactcgggaggttgaggcaggagaatggcgtgaacccgggaggcagagctttcagtgagccgagatcatgccactgcactccagcctaggcgatggagtgagactccctctcaaaaaaaaaaaaaaggaaaaaagcactgttctttgggttataagaatttaaattagagattctaagcccatataaggagatgaaaaataagcttacagtacgcaaaaaagaaatgaaagaaaaatgtatcaagaggaaagctacattaggaataaaaaattagaataaaacaggtgaaaatacagtaggacatggtggacaggctagaagaaatcttacaaaaagaaatgaataataaagctatgaaaatgattattgagatagatatggaagaatgaaacttgttttcctgaagaagataattatcttccttcacttcctctgctaacgctgtcttactgtgaattgtcagacacttttctaagtcctttgcatatattaagtcatttaatattcacaacaactcatgaagaatggaagagatcagagcagaaagaagaaaaatattaagacataacagaagaaaactttctgaaacaaatacttaaatctgaagctcaaatggacacatggtattccaagaaaaatttgatatggaataatccatactaagacatttccaccagtgctcagcactagaacactacccagtacatagtacgcactcagtgaataattgttgattgggcgggcaaatggaagaaagtttcatatggctctcccggctgaatgaacaagtcacataaaaggagaagaagacaggctggcttctggttttcttaaagaatcactcagtgccagaaggcagtaatgtctatgaagtcctaagtgtaataaggggtaactgaagaattgtattgccagtccagttgtacagaagcaacagatagacactttcaatatgaatgaactgagggaatatactactcatgcactttccagaaaacctgtagacaacaaaatgatgagtcaaaattcaaaacctagaaatgaagaagctatggtaaaagcattcatggtgagtacagtaatgattttgttttcgtattggattaaaactaaacaactctgcttatggaacagaaaccttgacaatgtggtagtaatataaataaccaaaaccagtacttgggaggaagtgtgagtactgatttctttactttcataatggggaatagatttgtcagtagctaaagtctgaaattgaaatatatagttgaaaaaataatgatttcagcatcctaatgtttttcattacttttttcttaactttagagagatcttttagaaactattctctctttgtgaagacccattcatctgaagttctacaattccttcagtttcacctcaatttctgtttctttgttaagttcaagcaaagtttatacttaatgctttttcactacaataacatgtatggtatgattccatttatatgtatccatttacctgccctccctcctgcccttctgttctttcattcttctatcttttcctctgaacatctgcagaaatatgtctggaatgatgttgaccacatattatgatgtttatttctgggtggtgggatcctggataatttttttaaaatcttctttgtactttattatattgcctggcttttaaaaaataataaatatatcattttttcaaaaacaatgaagtcattattcttttaagattttaagagcaatgtggctgagaaactttccatttggaaaagacaaagacattggcctgattttgtagagaccctcctttctgtccgataagcgtttcctggtaagcaatgccctgtgctgaggggttgagagatagaagagtggaccctgtccatgaagagcttaccagcgtgtcaggccttgcttctcaagtatggtccctggaccagcagcatcagcatcccctgggagcctgttagaaatgtaagtccccagacttaccaaattagaatctgcatttttataagatctccaagtgctttgaatgcacacacaaggtctagaagcactgttcaaagatgaactcaaatgctggaggaaagaaaggggaactgaaagaaggtatactgaaaatttagaggtcagagcagctaattctgacttgaggatcaagggaaaattcctagagtagttgggatttgggggtgcattttgaaggttgattttcgtgagggatggagcactgtgttcttggctaaaggaggagcataagccagaagtgggatttgacgtggcagtggcaggaggcatcctgaggctgcaagccatagcgctgagcagcatgtctggaagggaagttagggacacatgacagatggccttcaatgctactcccaggtatgtgggtccattgtttaaataaaggtgcaccactgagaggtgactttcgctgtcagttatgtgaaggacgaatggggagaggagagcctgggacaaaggaagccattgggaagctgttgtagcagttctggcgtaaggtgtgaagggagcacggcaccagggcattcagaatggaaagcagagatggaaccctgcatggcactggttaacacagtagcatgctgcagaagaggccagtcacagccactgctccctgtactgaacgaaatcctcacaggtacagcactgacaagttacaagggcttttcacatgcagtaccttgaaactgtggggctttgaatgttaaggggagtatgaaaccatgagcctttaagctaagggaatttaaggttaactaagttaagctaacatggatagctacaaagcaatatatctaatcgtgtatatatatatagaactttaataataaccagttagtgattattgaaaaaggtgccaaggggtgtgtgtgtgtgtgtgtgtgtatgtattttagtcttgtgcccaagccaacactattaagtaccttggaggactttcttaaaattttgatcttacagacatccctttaaaaccatgtcctttaatttcaagtgtttgtgtatagctgtttaagtagaatgctttaagtttagtaattaagaaaaagtgataatctggctggacacggtaactcacacctgtgatctcagcactttgggaggccgaggtcaggaattcaagaccagcatgcccaacatggtgaaatcacatttctaccaaaaatacaaaaaattagccaggtgtagtcccggctacttgggaggctgaggcaggagaatcgcttgaacccaggaggcagaggttgcagtaagctgagattgcacccctgcactccagcctgggtgacagagtgagactctgtcacaaaaaaaaaaagaaaagaaaagaaaagaaaaagtgataatctgtctggaaactgtatatctagtgctttaggctatgaaacatgctgaggggaccctccctccattgtccacccctctgttggcattaccaaattgcagtcgaagtatggaagagactataaagcaggatcagcaaactaaggcccatgagctaaatccagcccattgcctgtttttgtaaataaactgtattggaacacagccacactcatcttttacctattgtccatggccatcttcacactgcagcaagaattgagtacttatgacagaaactgtgtggccacaaagcctaaaacatttactacctgccttgatcctacacaacttgaatctagtttgaaaaacgaagtgtctttttcttatggcaaggataagtttagttcaaaagttgctaaattttctcttatccataagcatcctttacaatttccttacgtcattttttccaaaatggaaataaatttattgactttttaaacattccaaatccttctgtttaatctacttcttaatatttgtttagttattcctccaaagtaggaataaacaaactacagccagccaggtccggtggctcacgcctgtaatcccagcactttgggaggccaaggtgggcgaatcacctgtggttgggagttcgagacccgcttgtccaacatggtgaaaccccatctctactaaaaatccaaaaattagccgggtgtggtggctaattacaggcacatgcctgtaatcccaactacttttgggaggctgtggcaggagaatcacttgagcctgggaggtggaggttgcagtgagcagagatcacaccactgcactccagcctgggcgacagagcgatactcgtctcacaaacaaacaaacaaacaatataactacagcccaggagccaaatctggccatccatctggtttttgtttgttttgtttttcttttttacagcccttgagctaataatggtttatacacttttttaaatcattacattttaaatggttacaaatgtaaccatgtagtacctggattttcccacttggcccacaaagtgtgcaatatatattatctagctctttagggaaaaagcttgctgacctctgactaaagaaccttagtcataataattagaagaactgtcagaattatagcaaagtctgaattttatagttttttttttgtttgtttgttttgtttttttttttgagacagagcctcactctgttgcccaggctagagtgcagtggtgtgtggtgtgatcttggctcactgcaacctccgcctcccaggttcaagcaattctcttgcctcaacctcccgagtagctgggattataggtacacgccaccacccccagctaatttttgtatttttagtagagatgtggttttgccatgttggccaggctggctggtcttgaactcctgacctcaagtgatctgccttcctaagcctcccaaagtgctgtggttacagatgtgagccaccatgcctggctaattttatagtatttttaaagaaatatacttgtatttctttggggtgcatgtggtccaaaagtagatattgtccacatgattgactcatggatgggcagtggtaactcaagtcagtccgtgtgtagcagtgccatagccacagattggttctggctgttcagagtgaaatgtaggaccctcctcactgattgcaagagaagactttgcttttgctcttaaacatgtgggctgaggagaggcctgggaatgccagacccattttgctttaatcagaactccaacctggttacagctggaactgagggaagggcagagctgagagaatcgcagaaagatgccgccaaaggcctgattgcaccatgcctaaaacccaccctacctgtccacattcaggttatgtgagtcaataaattgcatttattgtttaaatccattgaaattaggtttttgttatttgtcgatcaagatatcataaagaacaaaacagtgccaatctgcctgtacgaagaatttcacagaggagctttaagaaataacttctgaaattatttttggtacatgaaaaatcattgcaaaaaatttaattacagtctttaataatatggaacaggaaactaggaagaacaattttgctggatgactgaatcaagatccaaaaacatctgataggcaggaatgctttgccaaatgcggcactgtggaatttaggaagaacaagcaaaggcccaacctggatgggaaaatctgccttagtgaacatgcaggaaaagattagagacacccaccactgtgacgtgaccaccaaaccgctaatgtcattttaggctgcagcgttacgtagaacatctcctctctgtcctcaagccatactacctttggctgagtgctgggttccagactttaaaagggatccagacaagcgaacactcactttgagtaactgattgtcctggaagagatttgaaaccgcatcatgtgaggaacagtagaagggactggaggagtttgctgatgacatcagtgatgaccacagccataatagtaaacatgtattagttaccatgtgcctggaactgtgccaagcaatcgcacatcctatcatttagtcctcacaacagtctcacattgggggatagtgttatttaccacacctttctacagatgaggaaaccaaaacttacccgaggtcacacggctgtaagtggtcggaccatgggatttaaaccataggagatgactttatgtggggaatgcaacatctttaaatatgtgcaggattatcaagaagaaaaagaataaagatttgtttcatgcagttccaattagtagaacgaagaccaatgagcagaatttacagagaaacagatttcttttgagtacataagtccatctattcttccttttctccttaacggagtgattttcttttcttgatgcctctcttccccattcagtcttactgtgggacttcagctctatggctgtgtggaaaccctggtaggcttcccctgctatcctattcctccatggctacattctgttatttcctctgcctgaaatcctgtcaacccttgacttacggaacctcttgaatgtgttccttcttctccaattccactgtcaccctcagattagtccttgttccttctctccaagtctcctaaatactcttgacattgcacacccccaaatcgcatcacttccttgtataagaacccatgacagttccttattgcctgtcaaatcagattcatttactcagcccatagtgtgggttgagtaaacccatggaaaccttctatgactgtcttacttgccctgggcacttatcccctgccctcagtatcagtctgcttatgcctgtctttattttcactcatgctattccccttctgagagtagtgttgtcatttgctggtttaacttttattcttttattattattattttttgaggcagagtcttgctctttcacccaggctggagtgaagtgtgcaatctcggctcattgcaacttctgccccctgggttcaagcgattctcctgcctcagcctcctgagtagctggaattacaggcgcccgccaccatgcctggctaatttttgtatttttagtagagatggagtttcaccatattggccagactggtctcgaactcctgacctcaggcgatccgcctgcctcggcctcccaaagtgctgggattacaggtgtgacccactgcgccctgcctgttattatttttgagacagggtctcactctgtcacccaagctggaatgcaatggcacaatcccagctcactgcagcctcgaccttctgggctcaagcgatcctcctgcctcagcctccaaagtggccgggactacaggtgtgtgccaccatgctagatagttttaaaattttttttagagggaaagtcttgccatattgcccaggctggtcttgaactccttgaactcctaggtgcaagtgatcgtctcacctaggcctcccaaagtggtggcattacagtcgtgagccaccatgccggccaacttttattcttttaaggcccattttgtagtccacttctcccactcactaatcacttccttcttagcaccctctagttcttacaatctgttgaatttcacattctagtactttattaacaactctattggacttttccattaaaaaacagtggttccgggccgggcgcggtggctcacgcctgtaatcccagcactttgggaggccgaggcgggcggatcacgaggtcaggagatcgagaccatcccggctaaaacggtgaaaccccgtctctactaaaaatacaaaaaaaattagccgggcgtagtggcgggcgcctgtagtcccagctacttgggaggctgaggcaggagaatggcgtgaacccgggaggcggagcttgcagtgagccgagatcccgccactgcactccagcctgggtgacagagcgagactccgtctcaaaaaaaaaaaaaaaaaaaaaaaaaaaaaaaaaaaaaaaacagtggtttcttagttcctcagagtagattttaaacttcatcagggcaatgccatgcacattctttagctcaataagatttgactctggactgcttagacaagtgattactgactcataaggaaagagaaaattaatctgtttattaagttcttccagtgtcagtcagtgtactaagcagagtcattgcattcaatttaagatgaggaaaccaggctcagcgcagtggctcacacctgtaatcctagcaatttgggaggccgagatgggaggattgcttgaggccaggaattttagaccagcctggtcaacatagcaagctccccatctctatttaaaaaaaaaaattaatgatgaggaaaccaaagctaagtagttcacccaagatcacaatgctgataaaagttagacccaggacccaaactcaggcagcttggcttcagaacctacatatacccaccacaacgtaaggatcacgtagaacagcacttaataccagtcctgtgctctttttttatttctaacattattattacttttttaaaattatattttaagttctgggatgcatgtgcagaaagtgcagtttcataggtatacatgtgccatggtggtttgctgcacccatcagcccatcgcctacattaggtatttctcctaatgctatccctcccctagccccccaccccccgacaggccccagtgtgtgatgtgcccctctctgtgttcatgtgttctcattgttcaactcccacttatgagtgagaacatgcagtgtttggttttctgttcttgtgtttgctgagaatgatggtttccagcttcatccatgtcactgcaaagtacacgaactcatccttttttatggccgcatactattccatggtgtatatgtgccacattttctttattcagcctatcattgatggacatttgggttggttccaagtttttgctattgtgaacagtgctgcaatatgcatacgtgtgcatgtgtcattatagtagaatgatttataatcctttgggtatatacccagtaatgggatcgctgggtcaaatggtatttctggttctagatccttgaggaattgccacactgtcttccacaatggttgaactaatttacactcccaccaacagtgtaaaagcattcctatttctccacatcctctccagcatttactgtttcctgactttttaatgattgccattctacctggagtgagatgatatctcattgtggttttgatttgcatttctctaatgaccagtgatgatgagctttttaaaatatatttgttggccgcataaatgtcttcttttgagaagtgtctgttcatatccttcatccactttttgatgggatttttttttcttgtaaatttgtttagttctttgtagattctggatattagccctttgtcagatggatagactgcaaacattttctcctgttctgtaggttgcttgttcactctgatgatagtttcttttgctgtgcagaagctctttagtttaattagatcccatttgtcaattttggcttttgttgccattgcttttgttgttttagtcatgaagtctttgcccatgcctatgtcctgaatggtattgcctaggttttcttctagggtttttatggttttaggtcttatgtttaagtctttaatccatcttgagttaattagttctgtgctctgcttgagaactgggagacccagcactgctaagcatttgcatataagaaggacacttcattttttcccctagaagtggggatacatgcgtgtggtatttatgtaggcaacctcatcactgaccatgacttgagggagagtggaccagtgactttggaagcccattagttgaaaagtatcttgcttgattttaatagttgtgtagggcaggtgtatgtattgaaagcaaggccttgtccctagtctcaaaccttcttgttatttctaggagtgataaatatgagaacttccttggctccacaccctgacaaacttggtattttacctttttgcaaggttgattcttttatttctgccttctttgagaggtccctgtccccgtagccattttcgattggctagtgacatttgctatcgtatttttattatgtacaaataaagcagttatttctgaatattaattagacaatttttggaaaattgacttcatctttttcctattttatgattaaaggaagtgttaagtgtttaaaaaaaaaatggggtggctggtgggcgccatggctcacacctgttatcccagcattttgggaggccgaggcaggcggatcacctgaggttgggagtttgagaccagcctgaccaacatggagaaaccccatctctactaaaaatacaaaattagccaggcatggtggcacacgcctgtaatcccagctactcgggaggctgaggcaggagaatcccttggacctgggaggcggaagttggggtgagccgagatcacgccattgcactccagcctgggcaacaagagtgaaactccatctcaaaaaaaaaaaaaaaaaaggtggggggaacatgttaatgaagtaaaaaatggtatttggagaagctaatcttcagggcggtaggaaaggccaagggctaagctgcaacatggcatagtcactggggggctcactacacaggaaggagaagccacgggcacatacagatgttcacagggactatcacatgtataagccttctttgtgagttttttggagcaactattatatttgatggacaaaaagaaattttgatataaaacttgcactcttcttttcctggtgtttttttaccttggaattttgtgcacatatttaaaagtaagtacttctaagtgtcagctctggctaaagagaagctgtatccttcagagatgttctctacattaaataaaactttttaaaaacctgagcatgtaatcctgctgttggccagccactgctcttttatttggaatacaaaatatttatcatctggggactgtccaaatttattttcagttttttaatgtttaaaatatttctaaaaataaatattgtcagagaatattaatttaattttaaaaatggaatcagggcacatttttatgtagtggaaagagaagcaaatttgtaaattatgagacctaagttccaaatctgtctttactgtgtgaccttgggcacatctggccagctgggacagtttctttatctgcagggatcggggaagggaggaagagagaaaaagagacagaggtctttcccagctcccaaaggctaagcttttgtaatccaagcatcccagagttctttcttattgtaacagtgaccccttgtggtatatatccttaaccaattttgttttgatttgcaaagtaaactggattttttgttctttctagtaactgtatttcatgttgttaggcaaatatgacttgttttaaaaagataaatcttaccgggaaatcaaaggtaaattaaagcagcatatagaggccaggggtggtggcccatgcctgtaatcccagcactttgggaggctgaggcgggcagatcgcctgaggtcaggagtttgagaacagcctggccaacatggcgaaacccccgtctctactaaaaatacaaaaattatccgggcatggtggcatgtgcctgtaatcccagctactggggaggctcaggcaggttgcagtgagctgagatcgcaccactgcactctagcctgagcaacagggcaagacttcgtctcaaaaacacaaaaacaaaaacaaaaaaaacccacatatagagcaccaaaccccatcttttaaacaattctcgatggtttcttcagaaactgtatatcggctggacacagtggctcactcctataatactagcattttgggaggctgaggcaggaggatcacttgagaccaggaatcaccagcctggacaacatagtgagaccctgtctctacaaaatattttttaaaaataaccaggcatagtggcatgtgcctgtagttctggctactcgggagcctggggtgggaggctcacttgtgccaaggagtttgaggctgcagtgagctatgatcacagcaccactgttctctagcctggatgacagagtgagacctatctcaaaataataaataagaaactgtatatagcagactcttgtcatttacaaaattagaagtgttttcatgtttgcgctgagtgttttatgtattcctcctagggaccaggggaagagacatgcgagggcctcatcatgccccagtagctcagacctgagcaggctgcaaaccaaagcaggtgaggggtccccacactccttcatctacagcatctccacttgaaggaaagatgtttgcactgaagatatctatgttggccactggaaacttaaggaagtttgtccaatttggtcacaaatcaacatttatttttatacatttttattatattcatacaatgttaccatcttaccactacccaactctgatgcctcaaacatctatagatgacagtcttttttttttttttttttttttttgagatggagtcttgctctgtcgcccaggctggagtgcagtggtgcaatctcggctcactgcaagctccacctcccaggttcatgccattctcctgcctcagcctcctgagtagctgggactacaggcgcccgccaccacgcctggctaattttttgtatttttagtagagacgagctttcattgttttagccaggatggtctcaatctcctgacctcgtgatccgcctgcctcagccttccaaagtgctgggattacaggggtgagccaccacgcccggcctagatgacagtcttaatggttttatagaaatcattttgtaaaagcatttggaaagttgcaaaacttgacattaacatagttcttgggttcaaagcttgagttcaaggcattgcttggctgggcatggtggctcacgcctgtaatcccagcactttgggagactgaggcaggcggatcacttgaggtcaggagttcaagaccagcctggccaacatcatgaaaccccatctctaccaaaaaaaaataataataatacaaaaattagctacgcatggtgggagggagtggggcacctgtaatcccaactacttgggaggctgaggcagcagaatcacttgaacccaggagatggagtttgcagtgagtctagaccacgccgctgcactccagcctgggcgacagagcgagactcatctcaaaaaaaaaaaaaaaaaaagataattgctcacttaaatgaaactatattaactttattaagaccgtcctttgggcctttaaagtgtttgagaaaatatataacaatataaaccacagtctagaaatgatacaaaatgtattcatgcaatagaatatagttgtcacaaaagtgaactcatgggcttttgtaatattgtaatattgagtaaattcagtacaaacataatatgagatgaaacaagttgcaaaagcaaagacatatattgtttatggatacacagccatgtggtaagcatgcgaagtcaagtgtagtcatagtaaccagtggatttaggatggtggtaacccctagagggagaggaggaggggaatggatgcagggagccacatatctgtaatgtttcatttctttaaaataagggaaaggataaaaatatggcaaaatgttaatatctgaccaaactagtgtggggtacactgatgtctgttatattcttcatatatttttgtacccatgagattttacaatactaaatagtagattttaaaaattcttatcttcaaaatttagttttttatcaataaaatgacttctgtgtcattgggaatttctttactcaggaaaatcttagatatactaatttctgagccagcatagttgctaaggattttacatttacgtgctaaaaacatcagccaatccaaacattgtgtcaggtttttgtgtccagaactcaaagctgtggttaacaactataaccactgagacagcaaaatcttcaaaaacatgctgaaatttttgcttgacttacccaatttcctgttgaatcataatgtttatatttagcaaactgtgaacctagatgaaagtgctttctaaaatattagattgttgcccaagattgaaacaaccttattattatttgtgtgtttgtgtgtatcttaaaaagcaattatatgattccatgcttcattttctagagtaactcagggattgtgtataaaatggaggcaggaggaggcccagcgtgaatgaagaggtggaaaggctgtagccagacacaactgtgccctttgaaattcctgggagagggttggaaggaaaccctcataccagtgactgagtaactttggttctgagaagaagcaaatctcagaaacattcagaagggcccgtaagggttaaataaattgttctgtgatttctgattcacccctataattcagctctttctggggtgaataagttatccattttatttgtcctgaaaaacaggttgatagtcatggtttctcatagaagttctctattaagcagcatattgcataggaggtaaaaaatgcagacttgaacttattggactcaaagtctggtttctagtaaatttaagtgtgttataaatatgtatcaattaaataactcgcctgacttattttctggctttcacttgccttgataatgttgattttattttattttttatatactttggactttgaataggttagttatccacaaatatgagcaagtatgttttttgtattacttgaatattcatgtttacttttagaatccatatccataaattatcaaagttaaggcagattcataaaaacaatgacccaaaagattgagatggtagtctacaaactatctgtagttccagaatccctgagcctgatgggaagtcagttagagtcttggttttgtgaatattcatatattttgctacagggtgctgccgcagaagaccctacaggggtggtacgtaatatgcaatgtgtataccatattgactttctaaaatccatatgttcctgcatcccacaccacatctgattccaaaggttttggataagggattgtgaatctgtactgatgtggactaatttgtcctaaagacaattcaatttagtatctgatggtgaagtcttgcattgggttagatagattatctgaaaccttgctattaaggctatttactgcactgcaaatgtttaataatagctttgttgacaacctctatttacttttgctgcttaggtgatcttggatgccctgtgtggctcagctgctcttggcagtgggaagggttgataaaaggcaagcctggacttgctgcaactgggagtggccatttctagcatgtagtataatgggaaggcctgtgtgttgggtgggataggtagattgcacagcgtccctgcttctcctgggtgacatcagcaccatttgatggtttgaggattcatgtcagaattcaaatacatctctgaattcaaatgaattcttaaatatatgccattatgtgttatctatggatttctctgctattttcacagataatcatcaagggactttattggatttcttgatgcagagaattttattttaatccatattaatattaaaaaatattaatatggatatttactaaggtattacacacattcaatatgtgttgtatatatttttctcttcaagaataataagaatgcattagaggcattggaaaatacagaagagcgcataaaagaaattaataatcctaatcccaatatttagagataaccattgttaccccattttacagaagagaggtaaagcaatttgcccatagtcaacgagctagtaggtggcagagctaggattcaaacccagatggtgactccaaacctgtgctattgataggccccctgctcaacttgtcctttgtgcaaagtaacctgaaaatacatgggccatatacccgtttgctcctctgtctgtctctgtctctctgtctttctctgtctcttctctctctctctcttccaacctctcaccttccgatccttcctgatttctaactctttgtgtgacatttttagggtccaggcatcttctgtgtggacacttaattggtaccaggtccaccctgccccgagagggcatggactccctgacttgatgtagaccaagtgccggataaaggacttaaggggtggtcttcagagaagagagactgaggaatacatctcaggactattcagtaatgcctcagcacagcaaagccacctctagctacagtcagtgttttagatcttgagatactgcctgtgtgaaatataatcataatttgcagtttctaatatgagttacatttccccccagtgttaccctttagtcggctagtttgctgcaagtcagcatagctttgaggtcaaatgcagaggctggggagttatatgaccccaggcagataacttaatacacctgggctccactttcttcacttgcaaaatggagacagtttgggaacctcctcatagtgttactgcaaaaatgaaatggaggcctcctgcatctagagtacacagtcaatggttgctattccctacaacccatattcacaggcagcatctactcttgatggcttggtagtatcacacaggcatgagatactgcaggggtgataacatgtttgtatacttgtttaatcagggaaatgaaattaattatatactgtatattgctaaaggcttggcactgagctcagagctttacctataccatgtcttttaattcttatacccttgaaggcaaatattctgttttgctgatgaggaaacagagactcaggaaggataagaaactggaccccatcactcaccatgtccatagtggagttgggatttgaattgagatttgtcagccccgaaggcccaggcttttctgctacaccacacaaaatcacttggcattaatgctactggccccatgttagtgtagacattttatttctatagaaaatgtccattttaggtctcccttttagaaaatttttcattacacatttttaaaatccttattctttatatatctatagttacctattctacattacagagggataagtttaagtaaaaatgtactcaaaactgtttgccttactgacagtcatcagtatttacaaagcttactactttatgaagtgaccagatcacattttaaagttctgattttttacattatccagtctgagtttaatttggggtaatttgattagaagacctgtagttctaatgagaaatagtcaggcttggagagcaaagggtaatttaattctctagtttattaattgtagtgatgaatagtaaaggcttttgaccatgcttcatgacaactcctttttcatagctttttctcctgctctggatttcttttgcagtcccaaaagctgacctgcaagaagaggacgcagaaatagaagtagacgaagtcttttggaatacaaggattgtaccgattttgcgtgaattagaaaagggtaaaacacaaacaaacaaacaaaaaaccgtttttgttttttttttaaaaaatacctgtagttatttatgtgttccccattgccctgatatttttagtaagttttcactatcatttctgtgaacatgttcaaaaacaaatgaagtcatctatttatttaccctgtgtgtgttaaatattacatgcacacataatttttagtaagattatgctttaaatgcaccaagagagccaatttctaaaacttccctttgtaatataaattaattagcatttcctctgtccaaggaaatgctggtttaacctctctcaggtggctcttcatactcaagaaagtaaaagattaaaacagatttcaggcttggaagctgagtctcataaactggcgtccttgacaggtgtgcccgtggtttccttggtccaactggtatctgtcctactctcttgaagggagcacatccgtcaggaatgccacccacagcatgggaaatggcctgggatgtgtcccacccttgcgctctgaactgccccagaagtgaaggcccaccatcgatgggtccctgcaagggtagggaaagcgtgtcatgggatggccctccactttctccctctttgcagctagctcctcaaggattctctttctgaagttaaccaggctcctctggagcagtggtcatagccctagggagagcccagggcctggcacacagtgcacagtaagcctttgctaggagttgttgatgagcaaaccagcttggtagccacaggaagatgctctaagagaagcagggtaaatgaaccctccccagcaaccaaacagagatgtgctgcaaaagacctgattactgaaaagttcaaatgacctcacccctcctctgctccccattggtgcttggctgtgttcatggttaatgtgggagccctggacggggttctggtcccggtgctgctactcgccaagcgtatggccatgaggagtcacctagactctgtgtgcaatagtgttcttacctgccagatgaagtggagattaggttatctccaaaggcttctgcagcccaaagtcctaaggatatgaatgtgatgactttttcccctctagagttactatgttcaccctcatcttagcgtgccacgttagctttgggccctttatttcaggagatatgtgcaaacactagtgagaagaacaatgagtctggataagggttacacaagaaaatatattgcacaacattgaatggggacactgagtcagtattgtgaaggcctttcttgtaggaagccttcctacaggaaagaaggaatttttttttttttttttttttttttttttttttttttttgagacagtcgctctgtcactcaggctggagtgcagtggcgcaatctcggctcactgcaacctctgcctcccaggttcaagctattctcctgcctcagcctcttgagtagctgggactataggcacccgccaccatgcctggctaatttttttgtatttttagtagagacaggggtttcaccatattggccaggctggtctcaaactcctgaccttatgatccacctgccttggcctcccaaagtgctgggattacaggcatgagccaccgcacctggcctaattttttttttttcttttgagacagagtcttgctctgttgcccaggctggagtgcagtggcacgatctcagctcactgcaacctccatctcctgggttcaagcaattcttgtgcctctgcttcctcagtggctgggatgacaggtgcgcaccaccacaccctgctaattttttgtattttttgtagagatgggattttgctatgttggccaggctggtctcaaacttgtggcctcaagtgatccacctgcctcggccttccaaagttttgggattacaggtgtgagccactgagccggctggcatgtatttcttagaaacaaaaacattctcttatatatctggaaattaccatacaatactataaaaatcttactcaaattttgccaatttgtcccaataatttcctttgtagaaaaaataaaagcctggatcacaagttctcatcatttgtcacgtctctttcgtgatcttgatgtatttgaggaatattttacagactgtcccgcaaattgggtttgtctgatgttttcccgtgatgagctccaggttagcatcttgggcaggcagagcacatgagtgctgctgtgtccctctcagcacctcctgccaggagtacacgatgctgatgcgttctgttgctggtcgtgtcccacagctgtacccactgtcaggtttttattctttcctttgtaatgaatacatatcttggggatagaagttactctgagattatgttactctctgttacaatcaaacttttacccactagatttagccccttgcaaatcttgatagtttgtagattcaagttgtcttttgaagctatagagcatttataacaaactatttggtataaaggattgatttgatcaatagtttaaaatttgacccttgagcctttctttctaacccctttttaaagctaaaaacaagtattcttgagtagaacctaccaggctgaagagtttgtggaaggaagtcttagaaaatactttgaggaccacccactgccaatgagtggcccagagcctggacttagggtttgtaaagaaactgccagtcacagaagaataaaacaacaaaacacaagtgtttcatacaataggagttcaggtttttccctttatttaaagttaggctaagtcatttcccatcaattcattcatttaagtgcataaccaaaagacattgaaggttacttagctattgaggtttaaaattttttcttagatgttattgttgaaaagagctaaaaatggcctgagtcacttccttctgcaggcacacacttcctctatgtgggcttctaagagcacattatggtatttatttaagattggtttcctacttttaaatttcatgaaggaatctatcagagataatattatttgacagaatacattagattattttatttcccctcatgttccatttttttgtgctatttttcttctttgtatgacaattagtgtggctgccacttccaaaaattacattcccaggactttgggaggctgaggcaagcagatcacttgagattaggagtttgagaccagcctgggcaaaatggcaaaaccccatctctaccaaaaataaaaaaattagccaggtgtggtgacaagcgtctggagtcctagctactcaggaggctgaggcaggaggattgcttgagcctgagaggtggaggttgcagtgagccaagaatgtaccactacactccggtctgggtgacagagtgagactccatctcaaaaaaatataggtattactttcctcacaaacataattataagatgaaaggttcaagatctccctgtttcctaactaaaatactctccttttttttaaatttattttttattttattttattttggaagtaggatcttgctatattgcccaggctggccttgatcctggcatcaagcaaccctcccacctcggcctcccaaagtgctggatttacaaaaatatttttattctcctgttttttaataaccacctccagataatggtggattttgtgacatttcaggcttttgttctattagaaccctcttttcttaggtaatgagcattgttctcataggaaaatactgatcattgtttttgtcaacagatatattagaaaatgaatatgtgtgaagttatgctatatacagtattctatacaatattctcactgtaccatgtgctattgatagaaagaaatgtaagactggctcacttagtatgacatctatttgagggcactggtcatataacacaacacacacatacgtacatgaaaaataagtaacctaaggtaatgtttgttgaatgtggaatagtgcatcttttctgaagcagctacaacataaacagagcctcgaaggaccaaaaacagtaggaatgagggttatggagaacattttaggccagtagagctatgcaaaaaagagttgaaggtcaagatgcaagtggcatgcatctgtgagactgagcagatcacgggctgaggtggagggcatctggagtaaaggaggccaactgaagcaggtagcagtcccattcttcaatacctctttgaaagactgtgtattctagataagctaatgactgataagcaataagtcaacatggtaggagatggatcaaagggatgaaaaaaatcaggtagatggaagtgataagataagaaaaaaatagaggtcaggaatttgaagatatccaaggaaataattatggggtttttacttacactgtctgtgtttgacacacttggaaacttaaccttaattagtaagtgttgctttactctctttgctctgacagaagaaaacattgaaacggtttgtgctgcttgcacacaacttcatcatgctttagaggaaggaaacatgcttggaaataaatttaagggaagaagtattctcctgaagaccctgtgtaaactagttgatgttggttcagactcgctcagccttaaacttgcaaaaataattctagcagtaagtttttctttcctctggtctagtagactatatcacataaaagctttgtttaatgctttatttttaaatattacaaagaatattagaaatgcagtgtatttgtttagaatcttggaaaaaaattaaggtaataaactgacatctcagaatttgactaggaaatattatctaaggaactaaggctgagtacatagaaaatgttaaaagaaactcaacgtttttggactgcaactaagttaaaaaaaaaaaagaagaagaagaaggaaggaaggaaaggcaagaaagaaaaagaaataaccgtaggcaaatacattcaaaatggttgctcaaataacttgactggagatcagtagcagatggtgcaggcagtggtttctcttggatgcttgattctgtcatatgatttaataaataactaagtaatttaggccacagtcataataaatcaggtgctttaggaaccagtgtgaaaccgaaatacagctgcgtgtggtcacaggaaggtacctcagtggtcatagaaggctttcacaaggtgtgagaagaaaaggccagacaccaaaaaaaaagtctgtagaaactctgtctcaaacaaaatgatatcactgtttgaggggagcactttgttgtcacagccataaacagttggaaccaaaagataagccacaattattatagaatgttctaagagagccgctaaaacaaatgaatgaagctttgttttcttggtttcatacaagtacaagctttgtgctaacaccccataatttacagaatttaaaatcttacagtacacagtgaaggtaagtgttggcgtacttactgttagttaataagaatgccaccttttcttattctgataatgaagtctttcataaagcagaattttctgagcatgtatctatgtaatatcagggggaggctacattcttattcagctctcaaactattaactctctttttaaaaattgtgatatgtggtcaagaaagcaatacttctttgaaatagtgatatcactccagggctctggcggtgcagcagctgcccaaagattgcctttgctattttaatctgaatcctagacattttgttccataccaagccaaagaaagagagaaagagtgaggaaaaaaaaaaaaagaaagaaagagcaagaaggaaaggaaggaggaaggaaggaacatgaattattttaatgctttgcagagtaaatattatttcggttattaatggtgtcattcaaattaattatatatatgacacaaatttaactattttagggcaaaaggctaagtgatctgccaggcagtgaacatgttttgaactaaacatatgattagataaagccctcttggtgacattgacggccttgctgaatcaggagcaagatgctaggctaaactccagagtgcagagctgggtaggtttgccttctgactagctacagaaccagcagttcagaagggaccttcaaatccatcaaggccaacttcccatctactgcctggatctcctgtaacattccagacaagatcttgtttagcttaggccttggtgatgcggttctatgtaaaatgttaaaagactacatcataagaactgttgaagaagaaaaaatcagcaaaaactaaagctatatgggactaagaagttttttacaacttctctctgcctgtttattggcaaatactggcaaatgaaagttttccagacagtcatcttaattttaatctttgtgtcagaaactcttacaaaataatatacaaaaatatataagcttaaatgttactatattaagattttttaaaggagtacaaacaaatatatacagtatgaatgtgactatatttaggagggaaaaaatctagcgccctatgtacagggtaaaaaaagaaaagaaataccaattaccaactgtgatgctatatagtggtactagtatgagtgattttaaacttttcttacttttctttaatttgccaaatttactttaaatagaataaactactgtttttaacataagaagaaaactaccctaccacaagaacctactttgtgccaacattttttttttttctttttcttaaagacaagatctcgctcttgtcacccagggctggagtacagtggcgagatcacagctcactgcagtatcaaattctgggctcaagtgatccttctgcctcagcctccccaggagcttaggatcacaggcatgcaccaccacacctggctaatttttaaaaaatgttttatagaattggggtctcgctatgatgcccaggctggtctcagactcctagccttgagcagttctcccactttggcctcccaaagtgctgggattacaggtgtgagccactgcacctggccagagactcctcttgacactgggaatacaagtgaataaactagctccttcctctggggttgccacagtagcagggcagacagacagcaaacacagcaggtaccaaaggagataatgagaactaagggagaaaaataaagcagagcaaaggaaagggagagtaacagggaatttttaaaataagatcgtctacatcccttgcataaatgtaagattttattatctttttatgtcttaaagtcataattttacggttaacaatggagaagcggtacaaatttgcactgactgtaaattgacattatagcaggcctggaagttgtagttgtcttttttcttttctttgttttcatttttgttttttcttcttattgttttaatgaaaactctgatacaaggttttgttttgttttgttttcctttgccactttttactaaaaatgtaagatttgttggggaaaaggaaagtgagttgtattcatttttttcatgaagttttattaagtatggaacacatcctacatactacatatagaaagagtaataaattgtggttttgacctcaaggactcacaatctagtagaaggtagtcaaccaattcaaatatatttccagatattaggaataatatatatttccatcaatatagaaatgttcttctgttttctttctttctttttttttttttttttttaactagtcatcttttatttggaggttaattgccattaggatatgaaagaattcagcaacgatcgagattgtgttcctcacagaggggctcgggccaaggtcgtggggtgggggggtgcagagcgtgtcctcttcagtggtatttgcggagccactcgtgcttgagatgcttgtaggaaaaggagtagctgaagagcacgtagcatgccagcaccatggtaacccccgagatgctccccttcttcacattgatgtacttgtagtaccagtagtaacctctttgaaacgctccgaaaatgccactagggctgaagtcccccatcaagatccagcttggcagctcccccagtttgacctccagaagtttcttgtccttcactggtacaactgacgctatcttagagtcctggtgtccgctgtgttcttctgttttcttaagcccgcttattttctgggggttttaaacaatattattttaaatacctaatcattaaacatttattaaggttcccatttcctattttcctcctgggaacagaaggaatctccattctgccatgtgttacagtttctgaagcttccacaacagtgtttcccagacttcactgtgcacatgcatcccctggggatcttgtaaaatgcagattctgagtcggtagtgctggggggggcctgagattctgcattcctaatacatgcccaggtgatgctgagatggttctgtgacctatctgaggcacgcactcctcaagtgcaaagtgtgaacgacaacaccaaatttccagaataacttttgtaagtggcctagtgcaggagggtatgcagaagctgccccacaggcagtgctcccctccccaggcccctccagcttggggctgaccatggccgttttggtgtcttctgcagtgagcagcatagcgcctggtacacatcaggtgcccagtaaatacttgtggatcaagcacagaacaaatacttaacaaatatgcctgacagattctattatttttttaaagtaactgaaaactcattaataaaatgtgggaggctgaggtgggaggattgtttgagcctgctagttcaagaccagcctgggcaacatctctacaaaatgttgaaaaaattagccaggcatggtggcacatgcctatagtcccagctgctctggcggctgaggcaagagagttgattgagcccacgaagtcaaggctgcagtgagctgtaatggcggcatcactgcactccagcctgggtgaaagagcaagaccctgtctctgaaaaaaaagaaaagagagagagagagaaatgtcgtagccgggcatggtggctcacacctgtagtcctagcactttgggaggccaaggtgggtggatcacttgaggtcaggagttcgagaccagcctggccaacatggtgaaaccctgtctctactaaaaatgcaaaaattagccagtcatggtggcatgtgcctgtaatcccagctacttgggagtctggggcaggagaatcacttgagcccaggaagcagagattgcaatgagcctagatcatgcccttgcactctaagctggggaagaagagtgaaactccatctcaaaaaataaattaattaaataactttaaagatagtttttaataataaactaatcacctatatgccatccttttcaaacagaaataattttttgttcagatgaccttattcctacaaatacatttttacacctttgtaatgagggcacatattatttccatctaacagtaggttataaatgtttccctttttagacataatgttcacagttatgcttttttgtgactgcttaatatgatagtattgatgtcccacaatttaataaactattccctaatattagatacttaggatgttttttatttttcttttttactactttagataaatacacagctaacttagaccatttgattccgtcagtaatcctatactttgctttttaaaaaaaaaaacactatatttccttatcaccccatgtttaatttacttagatatttttgtatgatttagaagagaattttcttttctttttttattttttgacacggggtctcactctgtcacccaagctggagtgcagtggcgcgatctcggctcactgcaacctccgcctcccgggttcaagtgattctcctacctcagcctcctgagtagctgggattacaggcgcgtgccaccacacccagctaatttttgtatttttagtagagatggggtttcaccacgttggtcaggctggtctcgaactcctgacctcatgatccaccagcctcagcctcccaaagtgctgggattatagacgtgggctactgcgcccagcctagaaggtaattttcaactttagatgttacttgtgattatctcaaagcattccagaaatagaccttaaaaagaaatatatgtatattatcaaattaagcagtattacttttaaattttcttttatacaaatgataaaaaagaccaaaactttccccctttcttttctttccttcatctctactatgtgttcttttctaaattaatgtgaaattttggtattcatcttcctctacttttgtgttttaatgcaattactctaatcaaatttattaacagtgtactgcacccctttcttcctcatatactcctttaaaagtaactaataatcgcatatataaatatgagacttggctgggcgtggtggctcacacttgtaatctcaacactgggaggctgaggtgggaggattgtttgagcctgctagttcgagaccagcctgggcaacatctctacaaaaaaaatgttgaaaaaattagccaggcacagtggcacaagcctatagtcccagctgctctggcggctgaggcaagagagttgattgagcgcacgtggtcaaggctgcagtgagctgtgatggcagcatcactgcactccagcctgggcgaaagagcaagaccctgtctctgtaaaaaagaaaagagagagagagactttatgaagtaagaaatatggagaacagattggaggttcctcaaaaaactaaaaagagagctaccatatgatctggcaaccccactgccaggtatatactcagaagaaaggaaatcagtgtatcgaagatatatctgcactcctatgtttattccacagtattcacaatcgctaagatctgtcattaaaatgtttattctaaagataatttatattgtgtttactctaattgagttaattagataccacaattggcaaatatgtggtctaaatttttcaaagttgatttctttagaacttttcttcatgtttaaaaatactgttgctgtactttaaaaatagatgtggtttattttttttaatacagcatgtctttatttccttctgcaatagagatgtgtttctttctctgcagcttaaagtgagtagaaagaatcttcttaatgtctgcaaacttatatttaaaattagcaggaatgagaagaatgattctttgattcaaaatgacagcattctgggtgagtgtcattcagtgctactattgagcaaatgctgtacttgagtaaaaattagaagtctggagagaaaatatataatcaatgatagcaagaatattttgttttctagaaacatgcagaagttatgtgatgctcatttttacttcatccttctctgttttccacattcagttgaatgcatcctgtggtagtttgctcttttccttcaacacctgtagtaacattatgtgactttacaaagtgttccccatttaagaattcatttcctggacttggatttaatatatagaaaaatgcatttaatagtatttgacatagttgaaaattttagtcttttaatatactagggatgactaaaagttgaaagacatctataactgttatagaaacctgacatcaacatgtttcaaatttgtaggtaaggaagttttattataccttatctagctaatgcctaatttttgttgtacttctaagtaattaagatatctagttacctaaatggaaatctttttattaattaatattgctgatacaagaaaagaaaatacaaagtattttccatgcagcaacatggaaaatacattgagttctctttttgcaacataggataaattatcttttcatctttctttgcccctggcagatagggacaaaaccagtactgaaagaaatgtctaatgttgaatcaactaattaagaattgtcgactgaaaacaaattatgtcaaattattacattgactttaatataattaaatgtgagatatgcattattaacgttattggatttgcctggattactcgtaaaaccaagtagtggtatgttatttgaataaatgttcttaagttgtcttgggaaaaggataggcgttatattcaagttatctttctagggtgattgagatttttttttaagccccttcatggatttcccactaagaatacagttacaaatatattcttaaaggcttgttgaagtttaactcttagatgtgttaaattattagtattctatgactcaaaatttttgtaacaaaaaataaaggtcaataaataattagtaagaggcaaggaatgacattaattaaaagaatactttctcatttatttattaacaatcccatccttctgctgaaattactattacagagacttatcttagctaaaagtaagcttttctcttatactatataactcttaacaagcacttgaatgtagattttgataaatatattttacgaagtgtattttatgttcacacacaagtgctttaatatatttctctccagctgttatactcagacatttataataattaatctttttgacagaatcattattggaggtactaagaagtgaagacctgcaaactaacatggaagcttttttatactgtatggggtctataaagttcatttctggaaatctgggatttcttaatgaaatgatcagcaaaggtgctgtggaaatactgataaatttgataaaacaaataaatgagaacatcaagaaatgtggtacatttttgcctaattcgggccacttgctagtccaggtaagtattttacttgaaaacgttagatgtgtaaaattagttttcacattgcctaatgccagttttaaaagaatggcatgcaagaggcccctacagccaggtgtgggtgcctggcctccaagggcagcagccatagcccacctccaccccatgagggcctggtgcctgttgtcctggacaggctattccatggctattacaagagcagctctccacacagcatgcgctttcactgccctgcagagaaagcaggcctggaagaaggaaaaagttgtacctctctgcaaaacaattgcatgttagagtcaaaattttaacaagctgcttagagtgttgaagatgggcctggcctggagatgatttatgatgattggtagctaatgtcattactcttgtaagaaacagaaggtaacgggattgagtggacagtcactgaggtgggtatgtagatatcaggcagccccgagactgtaggaatgcagggaacaaaactggacgcatggaatataaacagagcaggtagaccaattttgttatatgttagggttttattacttctgttgtagcagattaaatttcatagttaaattattttcactggagctgctctggcttggatactcttttagatgagattttactttttaatagcattcatatatcaaataatagcatctttgatgtaataattcataggattcgaaatgtgtttgtcaattaatgaggattgattgagcactcagagcacactaagccattgggaaactgtgttaaaaattagatttaggccctgccttcaagatgcttaaaatatttaggatgattattaattttggactttgtggtctgtctccattttgaagaagattgtgaaaacctcttttagtcatcaatgatgcacagtttttctgtatgccctgttttggctaggaagacttcagaaacattttccatgctcccagtgttatcgaatcatttaattttttccctcaatgaaaatagtaatttctaattatagaataattatatttcctgttaaaatgctgaaaagtataaggaagaatataaaaatcacctgcaattttttcaccctgagataacacctccagcattttggtggtcatttatatacatatacataatttaatagaattctcactttttaaataacccgttacttttaatagtcacttttgtttgtttgctatcattctcttccctccctgtttctccttctggtttatccatttagctaacattgttcacactgatgtgttcagcaccttttagtacacacacaggattcaacaaatggaatattctatgcccttctctctcctcatttaacaatatgtagtaaaaatcccttgagttaaccctaaagacttatttaattcttcttaatgactgcataatattctgtgattaggatatatctcaaattctcagccattcccatattgagatattcactctgttttaaatttttatgtaacagcttatgggattcttgtctagttaatctctttccaaccccatcttatacatatataaatgtggtttgctgtttgcatcaactatatcactgtgtgtgtatgtctgtgtgtgtgtatgtgtgtgtatgtgtgtgcacccacacacatatgatcagtgggtatgaagggaagttgagtgttactgtgaccaaaaatatatcaaatcaagaaaggggacctctggtgtgcacatatagtatattactccctgtgttactcttttatgtccctttcccctggattcagcatccttaggtgcaaactgattcaccaggtcggatcccccctcctttcctgacatttgtgtccccccacctctagggggcgctgtagaagttcctcctcactgcccaccaccacctgccaccacctgatggcagtgggctctgtcattgtctccaaagcctttcttggaaccagcctaaggcctggcatgggtgacccacacccctgtctagcaggagaaaatggagcccatgatggcatccacccgaacttactccagctgtggtcaccaaatgccatttgtatcaactgtatcactgtttgtgtgtttacagatttgggaaggaaggagacattgttttagtctttgtcatttgcagaatcccctgaatgggacatttcctcatatttaatgaaaacaaaagctgttttgtatcatacaaatgataaaatgtaagcaacaagacttcactccaagagcagatgaaagcctctgcttttgtgaatgtgtaacactgactgacttttcaccagccggttcatgtgcaaattcagccagacagatctggccacaagcagaagtgtctgtttacaccagctttgagaacctggtaactccagctcagcaggcatttttttttttttctttttgagacagagttttgcttttgtcacccaggttggagtgcaatggtgtgaccttggctcactgcaacctccacctcccaggttcaagcgattctcctgcctcagcctcctgagtagctgggattacaggcacccgccaccacgcctggctaattttttttgtatttttagtagagacagggtttcaccatgttggccatgctagtctcaaactcatgacctcaggtgatctgcccacctcggcctcccaaagtgctgggattataggtgtgagttactgtgcctggccaggaggcatttttaaaagcagcttttttcaattgaaaaaataaataaattacttgtggctgtagtaagaataaaataatgtctgccagccagagagaacatgacgagggccaaaaagatacaagcaggcaacatctagtggcgtgactgcttttcttctatgactttcaaccccaagaacctcaggagctttggcccactttctggggacctcatattacagaacttcgcttgctttaacatctggcacagcgttagagtcatcttgttttccaaaagcagctccgttgggctcattgaaagagtggaaaacatcttccaaagctggaccctgaagattgtgcaggatttgggaaactagaacaaagggaaaaggatgttgaacactcaagtgggaaataaataaggtgtgtttgggaggtgctgaagaggtagggctgtctagagtagagattctgtgtgggaatcttggaaggtgagattcacaaggtacagccacgagtcttgaataccagctgccaagagtggacttggggcaacaaggagcagttggaggtgagtgcatggggggacgagatgagatcagagcggcagaaagatgaatgtgcacaaaatgttaaactgataaagaccaaatagctgaaaagtgatgggaggagaacgtatccgtgatacatgacagattggagggctaagatctcaaacacagcagccccagttaagaggcattgctgcagttagattttagactgattagaatggagacaaaggaatgggtatgaaggaaaagctccttcaaagcagacggactaatgttgcttagaggaaaaaaaacacagtgttgaactttggaaggtcttctttgtgttgtttcttacatatatgtatacgtatggctgtatgtattgatatatgtttatcacctggtggctgaaatcaagagacactcatttcacaagttttgtggtgtggctgctctgtgtcaagcatgttctgggtgatgagtaagacaggagagctgtcagtaggcacctactttttggtgatccctgtatccagataatagtattccaatgcttattcttctgcaaaattatggtacttccacatggccaacattgcattcagttctgcatgtcagaaatgtaatagcattttgagaaggacaagatgctcagagaaactgggtgctgccacctgtgcatcaagtcaaagcgtgaatagccccaggctggcaaaactggagatgcgagtttgtctgtaaagtcgtaagagtaaagcaggttaaactgtgcatgttcactgaactccagaacactagaatttagggtgagctccctggaacttggaaaaacagaaatataggccaactaacaggcaaggcccctaaatgccagtagtaaattgcaccaccaaggaggtggcacagatggaaagagggacttgtcagtgttgctctagaatggattatcatgaggtgttagggttcgtctgtgacctttaaagagctacagtcgggcaggcatgacacaggagctgaaggaaactcctggggtcacctccatctgaaagtctgttttggtctctgttgtgccctttcctggagaacagaagagtcttctgtctatgtcacaatcacaactaagcccaaattctcccggtgtctcctttgtcctctgtgtcttgagaacatcatgtacaaagctgctttgctgtgattgaaggaaatctcaatgtacttacattaacagctaggtaatttataggtgtacaatgtaactattaaagctcagattgacttgaacttgcatgcctattttttggattcacttgtacttccaatctgttttttctttacagcctgacccagttgattttgaattcaatccttagagaaatgtattatttgccttctttagatatactgtttttgaagttagaactgttctgcagcaccccaggtaacatggttttcttttcctctccacagccccctacccccgcttctctggcccctaagcctgcagacacctccctagcagctcccgcaaatccagatcctctcccccttgctcagtaccataccactgtcatgttcttcctttttctaaatggaagtctctcgggaaggtcggtcctcccacctcatcagtcctttccttccttcactcggttccttccttttgtttttagggtttagggaataggaaagtgtatggaacaaagagagctgactcagacaatttgagcctggatagttcagaaaataataaatgatggtatcatgaatagaaattagagagttacagaaaggaactggatttggtgagaggaggaaagaaaattgtgggaagaaaattatgttaattagctttatttttattttttaaattttaatatatatttttttgagatagagtctcactctgtcgcccaggctggaatgcagtggcgcaatctcggcccactgcaacctctgcctcccgggttcaagtgattctcctgtctctgcctccagagtagctgggattacaggtgtgtgccaccatacccagctacattttgtatttttagtacaaaactaaaattgttttagtaggtctctagtagagacgggttttcaccatgttggccaggctggtctcgaactcctgacctcaagtgatccacccacctcagcctcccaaagtgctgggtttacaggcatgagctactgctcccggccgaaattagcttgaatataaaactttcagatgccagcaggcctctcgagtaggaagtaggagatatgagctgaggcttggaagagcaggtaagatcaaaaatacagatttagggtcatctacatggatttgatggttgaaggcagaaagacaatgaaattacccaaggagagagtagagaaagagcagagggactgatgacagattctgtgaaaatggcctcatttgtggaatgggaagagaaaaggaagtgactaggaaatgaagggcaatgtacaagagtgagattttctcagcaaggatgggtcagctttggcaaatgctacagagagcgtgtaggagaagagggatcccaccactttgtttggagccgtgcgaataggcgagcgaggggtgtgagggggccatctcctagggcaacagtgtgctctcttgctctctttcaatcttacatagttctttagctctgtatttttaaattaaaagatgttttgatatacttgattttttttttttttaaatttctgagccctagagtgagctccccactttggcagagctgggctcaatcctgtattcattgtttgccgttgggaaccctgatggttcattcaaccctggacaatgctggggcaggcccagtgccgccaccctgcatggtccagtgaggatagcaccgcactggagcccccagcataagctagcctctcagctgggacactgagcccactttaccctctgagcctcagtttcctgtctctaaagtgctgactatgcctgccttaaagggcagctaggaaatgaaatgagatcgtctagtaaagcgcccataacagggcaaggcacatagtaggcactcaccagaaagccattcaataaaataagatcagaattaccccaacctgaagcttcaaagagcaattatttctgatgggataaaaatgtaatcacaagaaattaagaagacagagtccaagatgactttcaaatatttaatctttttgttcgggctttgataagcaatgtagagaagagcaccaaagagaaactaaaattggaggagggtgttagggtaatgtatgggattctgggtacatgatggaccccaattctcagagccagctattctttgcttcaagatttggggaatttaagagaggccttcactgaagtctggggatttgatcaagcagtgacttaagttattattagtaatgaaggttgtaccaggctggccggggtcttttaactcttgctttagttatgtttcatagtttttaaacgtagagattaatgcatttgtatttaggtgtttagataattataagtatgtgtacttatgctggaaattatgttaattctttatcttgcgcgaccccacctattggaagcctaactcttcagactgtgcaatcagaaccaaggtagcagtgtctaccagtagaactttgctctgattattggaggaagtaaactgcatacctataaaatgggagcaaatagccccatgattgtatttcctaagttcttacagataatttttttttggagatttgataatttaaaccaaatttaaagcatttattttgaaggttttgcttgaatagcaagcagtagatgaggtttttaattttctttttgttttaattaaggtataatctacatccaataaaatgcttagatcttatacgtttgatgagtttgacaaaagtagaaagccacgtagcccctacccttatcaagatacagaaggtttctgtcacctcagaaatttcctcccacctcttctcattaatcctcattcttctaccctcctcccagagggaaccatttttctgatctctttcaccatagataagctctgcctgttctaaaactttatataaacggaatatacagcatgtacccttttgtgtctggcacctttttaaacttttattttgaactaagtataaattcacaagatgttgcaaaaatagtaccgagatgtcctgtgtacccatcatccagctcctcccagtggtgatatcttacataactattgtacattatcaataggaattgatatggatatgccatagttacctagagtactatatctggtttattttgcttagcatattgtttttgagattagatgaagctattttaggggttagtctttggtattgatcgctacgctggctaattttttattttgttttgttttgtttttgtttttgtttttagagatggagtcttgctctgtcgcccaggccagagtgcagtggcatgatctcagctcactgcaacctccacctcccgggttcaagcagttctcctgcctcagcctcccaagtagatgggattacaggcacgtgccgccacttttttaatgatgtatttgttaatgggaaggagacagctattttctacttatggggcttccttcctataaaagaattgccagcagcataactaaccactcacgtgcccagttgccacgagagagtaggcatttggggcccaggttcttcctcttcccttctcttccctttcctaggaaggagctgtctataggcaactcatgttctcctccaattttccagggacagcagatctgaagatctgagaagactcagaaacctaaatatgtaatgccttgggttttttacttggaaataagaggctaaggaggctggggatggggataaagttatcaccgtggttggaggatgtggctgatagctgaggcaggcatgctttctaatcctgagtcctagaattagatttacccacccagtcacagaccatgtctgtccctggaggagcagaacacctttgttctgatggcagctcacttctaaaagaggaagggaagagagggaccaggtaggggctggactgggagtgtctgattcctgtcccaagctcaccaatcaggaagtgagggcggtggatggccaggagtgttatgctaaaagacagatcaagggtggaaatgaggctcctactgtgtctgaggagagccatttgctctcaattagtgctctgtctgctcagcctcctctcttcactgtagatctattagttgtggcagtaaggaaatgtcactagctttagcatataattgtgaatagtggtttcattgcttggtagttcttaatgcactatctttttcagactcctttttcttgttttgctgcattgccattctagattgtttgtatgatattcaaaatttctcctgtattgaatacatacatagccacaactagaagaatcagctacctactcattttagtgaagtaactggcatagaggcagtaaatggagaaacaacaataaacagagccaaatgttaaatagagtctcaaagtaggacattggaggtttaaggaggacagaagcatttcctgctaagtcggacacccatggtagggatgtgccaagtaggcctgtgtagccaggcaccgagtgttatcaaggattattaattaatattaccttcatatgcatatatcttaataaattccaagaaaagcttagacatgcatgttaccagtgatttcacatgtctagcagcatcttgtcattggtttcttttgtctcagccagaactgtacaaatcatatatgagacaatatgaaacttcttgggttaccacacaggctctggttttggcatatatgtggcctcaattgggcacaagttcaaagaaatgaatctgcctttattaatagagggagatggcttagctgaggttggaaaatagtggctttagtcataaatcatttcacactgtttgtggtctctggcggctgcgtttattcttttacatcatcagtgggaagtcaacaattttgcagttggcagttaagttgagacaaagctcgagggatttcagttgtggatattccagataattgcaaaatgcttttagagaccagtgccaaatagagtagggaggcaatagaccaagaaactgaggccagggcactagcctacctgggagctgatagacttctgagcttcaatgagtcacaagctcctctgatctggggcagctctgatggcaggttgccttctagagcagaatctggtgagttccttgaggacagagtactctgatggaggaagggcacagagggaaaagagagggccgtccactctggacatgatcagtgtgtgtggaggttgccccacctcgcacccacccactgcagtagagaacgcaggaatgagaccacagctgctgggcctgtgttgtgtcctcaagtccagtgatccaagtccggagggcccccccacccttttttttttcttgagacagagtctcactgtgtcactcaggttggagtgcggtggtgcgatcaaaggcatggctcactgcagcctcagcctctggggttcaggcgattctcctgcctcagccatgagagtcgctgggattacagacctgagccactgggcccagccccatattttaagacaaatatttcctgtgtttgctaaggtttctcaattaattaatagttgaaaacacaatttgaaattgataattaagtacctatagtcaacttgaaaaaaacagaagctaaagcttttgagttctcattttactgtattaaaatgtagttgtgcatttataaatgatctaatttcttcttagtacattttttccctttaaaatgggtctcccaatactgactacacaatgaaaactttgaggcttacataattcaatgtgagctgggtagctttgccaagtctccaggtgttttccctgactgagggtggtacctgttatgatcaaataatttggggaacatggaaagaagctttctcagaaaagtgagcaccagaaagttgtcaagtgtagctcagtcatttttcagtagtagattggtaaccagaagcaaaatggaatgtttcttcctgggtatttaccaaaaccttaggtccccttttgtcctaaacatcacctaacaattgctaataagcaaggaaacttacatttgtattagtcctctttgtggattatcagtgtcattttcttctcttttttctccttcctatgggctgccttcaggattgcaagtcccacaggattgcaagttaagagatgggggaaaagataggaattaaaacttgtgtttttcagtgtgctatttcttggtgaaatgctacttaagaggttgagaatttctctactaagtcctttagagactaaacaagactttttttaagtaagggatttgaggtggtttgaaaaattatatacaataaaaaagaaaaatgtgtgtttaagtttgtgcatttatagataatataaattagaatagaaagttaagaaagaaatggatgcacacctccaagcatgaagcttgggctttggttaactcctgctttgggggagggcccagtgggtgggcttttcttgagggtgggaaataaagaccctgctgtagagcacagaactcattgataattttcacagatttatctctgttcaactgagagttcttgtttttttttttttaattttcacttgtatataatgaattcaaaagtaggagcaaaattcagttaaatgggttgacttggaacttgcctttactgtgaccacatgatttagctagactctcctccccacacccttttttttttttttttcctgcattttttccagaaaaggccactggtctgagcattcagggccccaccatcatcccacagtgagattggtggctctcagaggttggtgacaagtctctcaagatacagggccttcagagctgcatctgcgtggtggccttttcctgatccttctccctcagggttttaggccctggttcacccaggcctctgctaagctcccgcactttcttgccagaggtgtcttaaagggaaaaacctctcttttgtcgctcctgtcccttctttctttcttccccctcctcattcccctcctccttccccttctcattcactcttccagccctccagtagctgaacatttaagagctttttatgagcacatttgttgtcctctgaatagaaagaggaataagaagtggtttgtaccctagaggagctcaccatgggagagaagatgcctgaagacaagtgacaatgcttctgtgatgggggttgtagaggcaggaacaggatgctttggtaacacggaagaggaagcagaggaagtgactgatcagcctcggaaaggacttcacagagaagttatcttgagctgggttttgaaaaatgagcaggaggccgggcgcggtggatcatgtctgtgatcccagcactttgggaggccgaggcgggcggatcacttgaggtcaggagttcaagaccagcctggccaacatggcaaaaccctgtctttactaaaaatacaaaaattagcagggtgtggtggtgcttgcctgtaatcccagctactcgggaggctgaggcaggagaatcgcttgaacccaggaggcggaggttgcagtgagccgagatcgagactctgtctcgaaaaagaaaaaagaaaaaatgagcaggagatggcccgggggagaaggggtggcaaagtgtaatcgagggcactctgggcggaggaagccgcctattcaaaggcatggcgtcatgaagggttgaggacctcatgtggtgcagagtctgaaagatggccagggtggtgccgaggcaaaggagatgagtttggagggataaaccacacttcagagactgaggaacctttaggctatgggtgctactggctgggccggaagtcgcaggaggcctttgagcagggaaggcggagctttgagatgccccctctggcagcagtgagcagctatgggggcaaactgtggaaggagcccatccagggggctgtagagtttgggtaagagatgaagtgagcttaaactgaaccagtgacgctggtgatggagagaaggggtgaacgtgtgaccagtcaggtggggaaaggggtggggcccgggagtttaggagcttgggaaggagctgctgtcagaaatgagataggctagagaacaaatacacagaggctggtccccttccagagagttcatttttctttcatccgttattttttattctgtgatggatgggggttatagaggcaggaacaggatgctttgttaacacggaagaggaagcgactgatcggcctctgaaaggtcttaaacatagacaagttagcctgagctgggtaactacagagtccatttttctttcatccattattttttactcctctgctttcaaaaaaaatcttaaaatctgtctacctcagagatattgtctgcttagcccatggtgttctgatatcccagtctttcctttgtagatgtccaccccttcattcattccattaataaatgcctattgagcgcccaccatgtaccaggcactggacttggagctggatgtacaatggtgaaaaggatgaacaaggtttatgccttcactgaagcgtctagtctggaggagtagacagatagtaaaacataatattaaataacctagcattaagtagagtttatgggggcatatatggtatgagatgaagcttgacgggttgagaaggaacagatctgttgagccttgtagaccatggtcagggaactgaatattatcctgggagctatggacaaaaagccaatatggcttggagtaacagaaagcagaaaggcaggattctgggatgtctctgcttgagcaactaggttgatggtgtcatctattgagctattgctgtgtagttttcaaatgtatggtatatgtttcatgcatgttatttctaccagcaccacaaatgacaaatttggaaatacgtgaggtattgtatattactcaactgtgtgtatcacgtgcagtaaatgggtaggaatttcaatcaaatgacatgtcacatataaatgtgggctttctctcctgacttgggttattcatgaaagttatgtatgtggggcagaagaaacttgagctgtctaaacttttgctaatgaggtgagaataaggcctgagaaggagaaaaaattgagattgaaacaagaaaataaaagctcctaaggaaactatggtcctttctgctggcaatgtcccttgccagagcttagatgaggggagcgtgaagatgactatggattgggatgtcccatctttgatgccttggggaccagggaaaaggaactgttggtgtgcagtgactggaatgggtatttcatggtttcccatgatgtctgtctgcatgggagttacacaggcatctgtactcttccgtctccatggaagagagttttgaggcatcctctgaattaatgtaaaccagtagtgctccggtgcctgggctgtctcaggagaacaggtggaaacggggtcagatgatgagaattttccattttatgacagcaatggaattcctagaatggttcattagtcttcacaaaagatctattcctggctgggcgcagtggctcacccctgtaatcccagcgctttgggaggctgaggtgcttggatcacttgaggccaggagtttgagaccagcctggccaacatggcgaaaccttgtctttactaaaaatacaaaaattagccagacatggtggcacgcacctgtaattccagctacttgggaggctgaggcacgacaattgcttgaatgggggaggcagaggttgcagtgagctgagatcctgtcactgaactccagcctggatgacaaagagagactctgtctccaaaaaaaaaaagtccattccttagcttagaagaagactacattgtgacattgtttagatctatggagttaagtggaatactcaagtagtttgtttcacttccaatgtttgggatactgaaactttcagggaagaatttacagaatcattgtataattgaattgattacaaaagacatgtacacatttatttgaagcttttttttttttttttacattttctgtgttttcagggtagtcagttatattttaatgtatctttttgttgctgttgttataaggaaaaactaatcatgtcatcttaaaaattgtttttaaaagtttatatactatggctgtaaggatgctttatgtttacatgatgctttacagtattagataagtaataaaaacagtgctacatgtttccatttgctacacacaaccccccgagaggtgagcagtgcttgtcatctgcttttcacagatgaggaaatggggaagtggaggaaggagtggctgcccctgggcacttcactaggaagagatgatggcagcgatgccattcacacatcttatctcatagaatcctcacaactgctagggaagtatcatcacctctactttattgaatgagaaaaatgagctctgggaggttaaataactaacccaggctgatgggtggtgaggctgaactggctcttaaccagtagctttcctgtagtgtcccacaaggaaggagcacactgcatattaaaattattagataacaacattagttttatgatttactaaactcttctcttcttgactctttgacgaaggtaaagtagatagctttcctgaattttttttttaataaaataagacaaatttgtgagatcttaatacttgtctcttgggagagaatgagactaaagatcttaaatattccttggccacatcattcattatctgatgctatttataaaagcatagaacaatcagacaagaatacctataaaattaaaaaaaaaaaaagaaagaaaaacatagaacaagaagtttctaatctgcagaactgatgtggctatcacagggccagctgaagatcttaggagtgttagcaaacctagatgatggtttgtttaaccctgggtttggggtataccaattgcttactaagattaatatttcattctttacctttcaaccaaattaggctttctttgttttcatttgttgctacttgtgcctaggctcacattccctggtgggagatgcatagcgggagctttgcttagctactgatataaggaaatttatgaaatgaattgtactatgctgtttcgtgtggttatattttttcagttcaaaaaaaatggcacaagcatgcttttatcctaggtgactgctacattgagaaacttggttgattcatcattagtaagaagtaagttcctaaacatcagtgcccttccccagctctgcacggcaatggaacagtacaagggtgacaaggacgtctgtaccaatattgccagaatattcaggtaggtagactaagacgtgaagtagccttacaaaaatgctaatgcttagatttggggttatctttaatatttgcttgtgtgactggcaaggaatccttttccttctttttacttcgcctaccagaaagggtaaatctagtggcccaagttaaaaatgaacaattcaaacaaatgaacccattgtctatatgattctattgtgattctaaactcattggttgttaagtcattttagttctttggtgagttgtgagctacgtgtgtgtgtttaatcttcctctcagcttatttgagataaaaaactgtatacaaaacacagcaaaccttccagtttgctaggaaataaacaagagttttaactcaaaaaaggggatcaatgcttagaaagtctgatgtgactttgtaatagaaggttattctatttcagctatttgaactttggctcaagctttcactagtcaagtctacacttactttatttcttccagaaataatgatcatttgaatccaggttgcctccaagcaagatgttgttaaatttcagaactgtctttgaattatgcatttctgtttcctcccgcgctgctctttgtcagtatttttacataatgattcttctcgggagcctgaggcttttcttgaactataatgttgtagttgtaaagaaatgcaaaatttcctgaagactgaattggtacttgaccccaggacccctgtataaggatgtgagtccaaatctgatttttttttaaatgaatgtcaacttgtattatagattaaatggtacacaggtttgttacgtgggtaaattgtatgacgtggaggcttggggtctcgacaatcatgttacccaggcagtaagcatagtacccaacaggtggttcttcagccccagccccctccttccctccagatctgatctttttatactgcacttccctgagctttgttctggatacctaattactacctatctaatgcattgtagaatcataaggaatttatttttgtttatagtgtcatgtaggggtccaacttcatatttttcccatgtggatagttgattgttccagcaccttttactgactatgccatcctttctcactgattttgtcaatcagacagaaagttccatataatttcaggtttgtttctgggcattctgtttggtttatcctcagacctgtaccacactgtacttactattacagatttaatttgagttttgctataagatgaatccttcactttttgttgttgagatggggtctcgctttgtcacccaggctggagtgcagtgggcacaaacatggcttactacagcctcgactgcccaggcttaaacgatcgatcctcccacctcagcctccctagcagctgggaccacaggtgcacgccaacatgctcagctaattttatcattattatttgtggaaacgaagtcttgctatgttgccccggctggtctcaaactcttgggctcaagtgatcctcctgcctcagcttcccaaagtgctgcgattagaggtgtgagccactctgcctggccttcaaatctctcactttttttctcctttaagatccaaactcttggtcaggcacagtggctcacacctgtaatcccagaactttgggaggccaaggtgggtggatcacttaagcccaagaatctgagatcagcctgggcaacatggcgaaatcccatctctagcgctgccccccacccccaacccctgccaaaaaattagccaggcatggtggtatgtgactgtagtcccagctacttgagaggctgaggtggaaagattgcttgagtctggaaggtggaggttgcagtaagccaagatagtgccacttgcactccagcctgggcaacagagcaagaccctatctaaaaaaaaaaaaaagaatccaaactcttcttgttcttttcccttccttatgaacttattaatcttgcattgatagctctttaaaaatatttacttatttatttatgtattttagctgtctcctacaggaaggatatccaagaatcttgatgaacattaggactaggagtttgtctatagatgctcttgaattttctatgcatattatctacatataatttttttttcaattattgtaattctttcccctgtcctcatctcttctttattgcattgtttaggagttcaatacaaaattgtgagtgttgagcctgttgtctttcttctgactttaaaggaaatattttcatggtttcactagttgaaaataatatttgttgtaggttttcctaactaccctttagaagattaatgattttttttctcattagtgggtattaagttttgtcaaatgcttgccctgaatcttttttttttttttttttttttgagttggagtcttactctgtcgcccaggctggagtgcagtggggtgatctcggctcactgcaagcttcgcctcccaggttcatgccattctcctgcctcagcctcacaagtagctgggactacaggcgcccacaccacgcccagctaattttttgtatttttagtagagacggggtttcactgtgttagccaggatggtctcgatatcctgacctcgtgatccccctgccttggcctcccaaagtgctgggattacaggcgtgagccaccgcacccggcccccacccccttttttttttttttaacttttattttaggttcagaggtacatgtgcaggtttgttacataggtaaactcatgtcacgggagtttgttgtacagattatttaatcacccaggaattaagcccagtatccaatagtcaaaagagttatcttttctgctcccctccctcctcccaccctccaccctcaagtagaccccaacatctgttgttttcttctttgtgtttataagttctcatcatttagctcccacttataagtgagaacatgtggtatttggttttattttcctgcgctagtttgctgagctaatggcctccaggtccatccatgttcacgcataagacttgatctcattcttttttatagctgcatagtattccatggtgtataggtaccacattttctttatccaatctgtcaatgatgggcacttaggttgattccatgtctttgctattgtgagtagtgctgcaatgaacattagcgtgcatgtatctttattgtagaatgatttattttcctctgggtatatacccagtaataggattgctgggttaaatggtagttctgcttttagctcattgtggaatcactatactgctttacacaatgattgaactaatttatactcctaccaacagtgtatgagtgttctcttttttctgcaaccttgccagcatctgttattttttgactttttaataatagccattctgactggtgtgagatggtatctcattgtggttttgatttgtatttctctaatgtatttgtatttctctatgatactgagctttttttccatatgcttattggccacatgtgtgtcttcttttgaaaagtgtttgttcatgttctttgcccacttttttttttttgagatggagtttcgttcttgttgccaaggctggagtgcaatggcatgatctcggctcaccataacctctgcctcccaggttcaagcaattatcctgcctcagcctcccaagtagctgggattacaggcatgcaccaccatacccagctaattctttgtatttttagtagagacggggtttctccatgttggtcaggctggtcttgaactcccgacctcaggtgatctgcccgcctcagcctcccaaagtgctgggattataggcgtgagccaccgcacctggccctttgcccactttttggtggggttgtttttctcttgtaaatttgtttaagttccttatatgtcctggatattaaacctttgacagatgcatagtttgcaaatattttctccaattctgtaggttgtctgtttactctgttgatagtttcttttgctgtgtagagctcttaaatttaattagatcccatttgtcaatttttgcttttgttgcatttgcttttagtgtctttgtcatgaaatctttgcccgttcctatgtccaggatagtattgcctaggttaccttccagggtcttcatagttttgggttttacatttagtctttaatccatcatccatcttgagttgatttttgtatatagtgaaaggaaggggtccagcttcagtcttctgcatatggctagcctgttaccccgtgattatttattaaacagtgagtcttttctccattgctttttttttttttttttttttttgttgagacggagtcttgctctgtcgcccaggctggagggcagtggcgcggtctcggctcactgcaagctctgcctcccgggttcacaccattctcctgcctcagcctcccgagtagctgggactataggtgcccaccaccacgcccggctaattttttgtatttttagtagagatgggttttcactgtgttagccaggatggtctcgatctcctgacctcgtgatctgcccgcctcggcctcccaaagtgctgggattacaggcgtgagccactgcgcccggcctccattgcttgtttttgtcagctttgttgaagatcatgtggttgtaggtatgcagccttatttctgggctctctgttctgttcccttggtccatgtgcctgtttttgtaccagtaccatgctgttttggttaccatagccctgtagtaaagtttgaattaggcaatgtgatgcctctagctttgttctttttgcataggattccttggctatttgagctcattttcagttccgtgttaaattttaaaatagtttttttttttctagttctgtgaagaatgtcattggtagtttgataggaataggattgaatctgtaaattgctttggtcagtatggccattttaatggtacaaattcttcctatccataagcatgggatgttttcccatttgtttgtgtcttctctgatttttttgagtagtgttttgtaattctcattgtagagatctttcacctccctggttagctgtattctcaggtatcttattctttttgtggcaattgtgaatggaatggcctttctgattcggctctctgcttggctgttgttggtgtataggaatgctagtgatttttgtacattgattttgtatcctgaaactgctgaagttgtttctcagctgaaggaggttttgggctgagactgtggggttttctagatgtagaatcatctgtgagtgttgggcctgttgtctttcttctgactctaaaggaaatattttcatggttacaccagctgaaaataatatttgttgtaggttttcataagtacccttctgcaaacagagatagtttgacttcctccctttctgtttggatgtcctttatttcatcctcttgattgattgctctggctaggacttccaatactatgctgcataggaatggtgagatagggcatccttgtcttgtgctggttttcatggggaatgcttccagcttttgcccatttagtatgatattggctgtgggtttgtcatagatggcacttattattttgaggtctgttccttcaatacctagttttttgttttgttttgatttgttttttgagacggagtcttgctttgtcgcccaggctggagtgcagtggcgtgatcttggctcactacaacctctgcctctcaggttcaagcgattctcctgcctcagcctccagagtagctgggattacaggcatgtgccaccacacccagctaatttttgtatttttagtagagatggagttttaccatgttgtccaggcaggtctcaaactcctgacctcaggtgatccacccgtctcagcctcccaaagtgctggattacaggcgtgagccacctcgcctggcatcagtacctagtttattgagagtttttaccatgaaggagtgttgaattttactgaaagccttttctgtgtctattgagataatcttgtggtttttgtcttcagttgtgtgtatgtgataaatcatatttacctgaattgcttttgattatgcattttcttatttaaatctgttaatatagtaaattacactaataaagtttctcaagttaagccattatatattgctgggtttggttaactaatattttgtttaggatttgtcattggtggtcatgagttacattgacctgtatttttctcttctcatattgtccttgtctgggtttagtgtaagtttataccagcctcataaaatgggttgggaggtaatccaattttttctctttcctagaagaatttgtaaaaagctgatcggcttcttgaaaagttttaaaaacttgctcaaaatgctatttttatccagggtatatatgtgtgtatgtgtgtgtgaatattgttgactactgattcaatttcttcccatatggttatatgtttctcatttctacttggttcagtttcaaaaagttatgtttttgtaggaatttgataattttatctaagttttcaaacaatataaaagttgctccaactattctcttattattattctaatctctgttttatctctaattatgtccccttttatttatttttcctatttaacagatatttgtatagcacttacaacatgctaggcaatattcagaatactttccaaatacgaattcctttcatcctcataacaactttttaagatatgtattattattgtcattatcattttacatatgaggaaactgagacatagagaagtttagttattttcccgagatcacacaactagtatgtcatagagctgcagttgaaaccgtatcctggctctagaattcatactttgaaccactgtgttaccttgcctcttcattgttaatattgactttctttcctaattttgattgttcgtgctgtttctctttttcttagtcttgcaaaatctttcctattttattagcttttaccaagaacaaatatattattgatccactttattgtatgtttgcttcctgtcttatttcttctgctcttatccttattaatccttttcttcaactctctgtgaatatatcatatttttcttctattttagtaaaaaacatgactcctttcttttcagcctccttaaacctataaattttcctctaaatactaattagaggaaatgagtatttataagtttttttgttttttgtttttttgagacaaggtctcactctgtcacccaggctggagtgcagtgttgtgatcttggctcactgcaaccttcgcctcccaggttcaagcgattctcctgcctcaacctgcagagtagctgagactacaagcatgcaccaccacacccagctaatttttgtattttttagtagagacggggtttcgccatgttagccaggctggtcttgaactcctggcctcaagtgatcctcctgcctcggcctcccaaagtgctggggttacaggcgtgagccactgtgcctggcccatcctacaagttttgatttgtaatattttttattactcgtatttaagtatttcttttgtaattttcatgtttctttgacctataagttaggtgttcttacatttccaaaaaaaaggtttttttaaatttattttttaaatgatttctaatttaattgcactttgaccagagaatgtggtctttgagataccagttctctgaaaatttactgagatttatttatggcctggtatgtggtcaagtttttaacatattaatgatgttttacctattgattcatcaattaggaagaaatatatgaacatctcctgatttgttgtgggtttgtcaatattgccttacgggttttgtttgcttgcttgcttacttgctttagaaattttgaagctgttttcaaggctttctgccttaaggttggtttattttgcctaatattagtatagcactaccaatctactatattaaagcaggtttttgttcgtttgttttgaatgtataggttttttgtttgtttgtttgtttgtttgttttgaggcagagtctcgccccattgcccagtctggagtgcagtggttcaatcttggctcactgcaacctctgcctcctgagttcaagcagttctcctgcctgggcctccagagtagctgggattacaggcacatgccaccatacccagctaatttttgtatttttgtagagatggggtttcactatgttggccaggctcgtcttgagctcctgacctcaagtgacccacctgcctttgcctcccaaagtgctgggattacaggcgtgaggcaccacgcctggcctattaaagcagttttacatttgcttctgatgtggtctcaggggactcactggtatccaaccagatttcatataaatttcatgtaagtttgtgttttctgaattacgtgggtagtgtacacctacatgtaagttaccttttaaatttttccggatccatctcactagagtgtagagcaggaagcctccttgcagcttctctgaactgatgtgtagagtatttttagactccttttcttgaactgggcaatgttttgaaggtctgcatttaaagtgatactatgtgtacttgaattttatagaaaaacaaagtttacctttattttcccatttggcatttctgcagcaaacttacttcttaccgtgactgctgcacagccttggccagctattccagatgttatgccttatttctgaatctaattaacaaataccagaagaagcaggtcagttcttcattcatttaattcttcaatgagtctttacactaatgtgtttgtgtaagcccatgttaaatgtctttatgttttgagtatataggtttctataagaaacttccattaaatgtataatgggctgccctgggaagcagtaagttacctataggagttgaaggagttatatgagtcagaaatgaaatgttgatgttctaggaagtttcctggtgtaggaaggaaggtggtagattataacaatatttttcctcccagtgatctgtagaaaacctacctgggagtcaccttggggtgggggagggggtataaccccaccccaagggttatttccgtaatggttatttcttccaggtttcattccagtctactgagtcagatgggtagggtaggacctacctagccatctgcattttaacaagaaccacagggacttctgatgcaaattaaggtttgcagttcccctgcactggatagtccctgaagattcttctagcccttaagttctctaattctttgaccccattgttatatttaaaaggtaacatttccaggtaaagtgtttaaatgaaataatttagttttaatgaatcaaggcaaaaatgtatatagttgtttaaaaaaggaagaacttacaaacgatttctcattaatcaaatcataatatttcatacagacattatttttatttttatttttttattttttgagacgagtctcactctgtcacccaggctggagtgcagtggcgatatcttggctcactgcaagctccacctcctgggttcacgccattctgccccctcagcctcccgagtagctgggactacaggcgtgccaccacacctggctaattttgtttttgtacttttagtagagacgaggtttcaccgtgttagccaggatggtcttgatctcctgacctcatgatccgcccaccttggcctccctcccaaagtgctgggattataggcgtgagccactgcacccggccacaggcattaatttttattataagtttttaaatattcgttaaagcaaagtctacttttattcactttcataagttattaaagtgacatcaacttagtgagatattttgtccatgaatacaatgagtattcattttaaatgtggtaaattttcaacatcctatagtaagttttgcgagtttatggaccaaataatttatgtatatactaacagtattttaatctgaagctttgtgtttgttttgttaaccatattaagaccaccccaaaacataatctctgtttgttactgactagcattgaacttatctttacccagccaaagacttctgctgagaattattaaatttgtcagatttaaccccagctttagcctcccaagtagggattacaggcatgtgccaccacacctggctaatttttttttttttttttggtagagacagggttttgccatgtgctgggattacaggtgtgagccactgtgcctggcccaaaagaattcttttacatgttatactcaaaagagatctatttatatattttattttataatttaatgttatgaattttaattataattttattttcccattactacctttttttttttttttttttttgctttggtgctttgatcttgggtgatttaggtgtctttaattagagaagatttatttgccttgccattagaattttcaaatatggacaaaagaaaatacttctgtttaacagtttgatttcaagttatgttataatctataatttttttaaggaagaaaattcattaattgagtactcacaaatagtgctattgttttctagcattactaatagatacttttgtttctctgattggagcttagatgatggccatatggaataaaccaacaaaaatcctggtacctcaccaatatgagagactagagatatcagtatggctaagagtatgctttttctagtttgagtaactaaatgtcctaaagtttttttttgttttttaaaataaagatgaggtctcactatgttgcccaggctggcctggagctcttgggctcaagcaatcctaccacttcagcctcccaaagtgctgggattacagatgtgagccactgcgcccagcctaaaaatcctaaagtttaaattggcataaaattttactatacttttcactaaactaattttcacattagaccaatggttatctgaaaagcaaaactcatgtttaagaaaccacatttttctctgttgatgtatattacaattttatgttcctattgatgtggtttggatttctgtcccagcctaaatctcctgttgaattgtaatcccccggattggaggtggggcctggtgggaggtgattggatcatgggcggagttctcacggatgggttagcaccatccccctggtgctgttctcgtggtagtgagtgagttttcttgagatctgcttgtttaaaagtgtgtagcacctccccctgctctctctcttcttcctgctctggcatgtaagatgtgcctgtttctctttcaccttccgccatgattgaaagtttcctgaggcctccccagaagctgagcagatgccagcagcatgcttcctgtacagcctacggaaccatgagccaattcaatctcttttcttgataaattatctaatctcaagtatttatctgtagcaatgcgagaacagactaaaatacctattaaaattattttaatttccaaagaggaatagagagcaccttgtaaaccatgtacagtaacatgcttattcagaaccatcaaagaaatgcatgttatcactttcatcactaaacttaatcattgtggcaaaaatcatattcaaacatattgcatgtttctcttccttcttagaagatattaaaactaacttaacctcttgataccaaaggtcattattataagcattaattattgctgtagagactgtttgtcccacatgtgaagcctgagtctgttgatgaggttctttaaatgtctgcatcttctttgtagattttctctctcttctttttctattggttgctacctccacctttggtagtctttacctgcttttttgcaattatttgtttgcaattagcaagggaacctcataaccaagcttattaaaattagcatgtagtcccagctactcaagaggctgaggcaggagaatcgcttgaacctgggaggcagaggctgcagtgagccgagatcgtgccactgcactccagcctgggtgacagaggaagactctatctcggaaatcaaggacatggacacacatggagtgaggttaactgcggaggtttaataggcaaaagagagaggagaacagctctctctcctgcgcgtgagagaggcacccaagtggaacttctggcccatgcacaggtattaatagacaggcttgaggaggcaatatctgatctacagagggcccaaagattggttggaccaggtgtgatgtttacatagcacgcagggaaggtggccaccccaacctaatcttcttattatacaaatggtgtttttgcttggccagcaccatgttacctgctctttactgtacatgtggctagcaaagagaagggaagatggagctgccatagtggacatgcctagtcccaggtattctttttcctattggcacagctggcagcattcacccgtggaagcttctagcttgcctttctatgtctgcagcttgattttacaggctgctctttattagaaaagaaattatttgggggctgcttttcattaaaaggaaaaccttaccgaggacctccttaccctcactatctgcctaaataatttctttttaactccagtatcaacacataagccaggcgtggtggtgcaagcctctagtgaaactagttgtccagcttggcaacaaggtgaaatcctatctcagagagagagagaagactggcaacatagacctcatctctataaacaaaaaattagccgtgcgtggtggcacatgtctgtagtcccagctacttagaaggctaaggcgggaggattgcttgagcccaggttgcagtgagccattgatcactagctagctagctagacagacagacagacagacagacagatattttagactaaaaactttaaaataaaattgaatatgaacagacttaatgagaagagcctaaggggctctgatgaaatttctctgtgacttctcctcttcaaagccaattccatatttcaagttgtagctctcttgtctgctcccctgtgaggcctcccaagcaagaccagtcaatttctccctcatcagtgcaacatttttaagactttaacatagctgatacccccagctagtacactcagagctaagaacccaagcagtatgcctatggccttaaccacttcactattattaagaaaaactatacaaatcttagcgataaggtatggaataggtggaggcatgtcctgacaaaggcatgccagggcattgtttaatgacccaatcagggattaattccctaggccaacatattggtgtttgaacttgctgtttactatttggttagataccagacacaataaagttacacgttaatttgtaggtttcaatctggtagacaggatcacctcaaaagttatggttttattactttgtaggcatttgtcaggtttgtatataacccagaaattttaagtgcttgtaaattcctggttcttcagttgtgcttggaacaaagtttaccgtggtatcggccccctcattaatgagttaaatactttttaagtgtgttcattttatgagcccatgagagtcatgtttttaacttttaaaaaattatactttgactcaatacttttacttataataaagattgaaatgttgtagttttaagtcattactttgatttttttccagtaagaaaaatacataatttatattttcctcaaaaccaaaatattttagaagagcagggaaagagtttaggctacaaggaagtagttgtgtgtcccaaccacttcctaaaatcattaaccagaaattcccataagtcttcataaacatttctttagtggttctccaaatggttatcattatgcagctgccctatccactactgcgagttcctaaacaacacagactttgtcctgatagaccgagatgatgcttggcaaagtaagctcataagtgctggaagaaagaattttgagtgtgtgaaatgctttggcacctgtaaggtgttaaaaaatattttttctagtactcgagtgcttcttccttaaatatgtactttcttcttcctagtttggaggaagaaataataagaatttttttcccacaattttcacatgggtgggctgccataaaaagcaaaacagaatcccttcagaccagcatggcatcttagtttcatgtttcccatgtcccaggtggccgatcaaatatgatttgtttttcctcttaatgttctgatgtgagtgtattgatctgcagtggttagacactttgccgcaactgggatttacttgaatgttgaggcttggaactgattgtggagacctgaatcagccttccagcaacttatttaaacagaattattacttcctataattattttttttttcagctcctggaaacatccctgcaagactaacttgggttgtagagaaatactctggaagctttgtagtctcttaatatacacagccattgccaagtgattagacaatcagaaagagtcagtagaccttccctgtttttgttctgggaggttagtattgcttctgtcttgaaagcctgaggactacatttaggatcagcataggtttcatttttctaagacacacttttaaatcaaatcatgtttatggctaatcgcgttttcaaaaaacatagaaacagaaatctaaaatgaacaagaaagaaaagaaaaaaaccctttatagtgataaatgaaatgtcacctacacatgcctcttgaactgatcttatcagcggatggggagcttcacaggaagctgccggtcgctgctgccgtccacagagggggaaatcctgttttgaaccaggtagcaccagggccgtttgctgttggaagaagtagaatatttcctccccatctgctgttgttttccattaaaggggataaaaattagaattacatgagaagataccaaaagtcacaaaattttccattatttttacattctttttctcttgtcaaggtaaagtctgatttcaacatatgagaagtctgaatatactttatatattcgagtatataaagtctgaatcaagtccatcgacaggaggggttgtggtgtggtttcacttttctatacaactgtgctgtgaggggtattgatgaggaataaggatttatatttacaagaattcatattattttttaaaaagcattattataaagacaaataatgggtattcaagtggtgagatttctaattttttcttgatttaaatcagagtggctccccaacttggcttatcatcagatttgcctggggagctttaaaaatacaggtgcttagctgggcacaggtggctcagattggcctgtaatcccagcactttgcggcagatggatcgtctgaagccaggagttcgagaccagcctgggcaacatggtaaaactctgtctctacaacaacaattaaaaaaaaaaccacaaaaattagctgggtttggtggcccatgcctgtaatcccagctacttgggaggatgaggcaggagaatcacttgagcctgagagaaggaggttgcagtgagctgagatcgagccactgcactccagcctggttacacagtgaaaccctgtctcaaaaaaacaaaacaagacaaaacaaaaggaacccttaaacctattttcaacttaaaatttgagtttaattaaaaatttttttaaattaaaaatagaaatacaggtgctcaggccccacccagagagattctgattcaggtctgggatggggcccaagaacctatttttaagagacttctcaagtgactcaaatgaacagcaggttttgagaccctatggtttaagttattaaggtggttctttaaaaccattttctccagtattgacagcagaggggttcccataaaacctcaaaagattttaaagtgattaatcaaatcagccacacagagtcagtctttctctacaggagcagagctgacagtgattcttcctgacaaagtaggaaccaagttgacaagacccaccaggtgctaatgtaggcttcccagtaagtggtaagaaccactggccctttgccttttgcacaggcagctgaggaatgatttcttagctggagaacacaggatggtacattagtcttttccacaaattttcgctgccagacttgtgtcaaaataagtcctgggaccaaatctagtttgaaaaaggtgctcatcacactgatgaggcttcaagcactggccagagtggctccctcaggagagatgggcacaggctctactcctcaggacccttagagccgcctgtccaagggagggtgccttcagttcagttggctagacaagctgcgagttgctgattcatttgttagtgaaacaagcaccaaatttcatctttaaaataattcctgcagatatcgtgttttgagacagttcagtatatacccatatctaaatgttgtagtttgcaacagttaaattgagagtgatgagttcacttagaatatggtccgctttacaccccctctgtttgcataatggccctcagtgaagtgggcctccgtttccatctgtatgtgatggttatgtgcatggcctgggtttctggctcaccaacagtctcaatgaaaaggcatctactcctcccagctctcataaatgacttccgcagggagagcaagggaaacttctttggctcatatctgtgtggttaatttgtccaagatccatgatgcaactagtaactccagttcccacacacacaaaaactgagatgaaacagcctctcgttcggcttaatgccgtatgaaagctaaactttagagttaggtaaaatatctattaaaaatgctggccaaaattcaattaaatgacaaatctcatttaagaaatgtgcacatattgtctgctttatggtgtaaactgcttttggtacaaaacaaatgtgcaagcagatgggcttaataacgaaggagggagtggggttgctatcagcctttgggaggcagagcctgcctcaggaggcgcctctgacgtcagtgttgctacatttagcatctcaggaaaatacatttgggtttgttttttggaagaacatgaagggattttccccatttcttctgtaaatatctactaggcaagagatctggtaaaatgcctcaaataagactttcaaaagactggcaatattttgcaaaggtcatgatcaaaaagaacaacctttgtctacattcctatcacatgtgtccattgaccatttaactctctccacgtttagatacggttaatttcttgtttcttttaccacagagcttccagatgcagcaggactgtcgtcagagcctttgcaaaccctgggaactgccagactcattcttggttgtgctgcttttaaagtcctacctctctcattctgtttagacttctataggcataagctgctgtcttcagccatgtatgcacagtgaacactgatttggaatgcttagccatcgtggtatcagaaatgagagctggaatgtctgaacagtgtgggctgaaagcaaaaccacctccatttttctagctgttcatcttgaatgtgaccacagcctttcagcattccagagaggtgccttctcttccccgctatcctctttgggccatcaaggattggttaggaaggtgcccccaccccttcccctggtgcctttgtagggcgacttggctcccagcttgtcctctgcctcctgcctgacaggagcacgccctatggctgtcttcccagcccctctgcaggcacattcccagcgggtgctgagagcatttggctgagcttgctccttttttcagccttggccttggtctgcgcccctgaccgggcaggctgtacaatacgcccttagcttgttcattctttccagctcctgccggctttgcccttgtggaactggctcttaccccgctcagcacggaacccaaatgcctgatttatgtctgctggcttgaaaaagaacttagcacagtgaaattctagcattggcctggtacttttgagtgacattcagaggcatatcgtgggtgctcaataaatgattgctgatagaacagatagatggatggaggaatcaagcgtaatctcttctggttttaaaatgattttctacttagattcttggctttgagtctccaacatttcagattcttcgattttatctagttaaacacgtaggcaaactcttgacccactttcagtgccctatggtcagttagcatttttgcagtagtgcacagtctgtcttccagtttgctaaaatttatctgttcttcaagccacctgcaagctcaattaatgtttgagttttgtttgagggtggtaagttggataaacaaagcaaattgtaaatcctgattcagctctcaggcacgagaagtttgtaaccatattttaaacagggtattttgattaattttctggttaatagagagttcggattttaagtatatttacatccccttccatttcaacccattcttacaaatttttctaaaatgtgttcctttacttagtggaagcagttccctcctaagtggagtctgctgaacatagtttattctttctgtgacagcttgatattgtttcttccccacagtcaacattatgcacatgagttattttaaggtacgggaggaagggtgtgggagtcggggaggaatgtgttcactgtggctggccatgggcagagagtaatgtgaggtagcaaagaagtggttgcgtggggccagatgatgcattagatgctggctttgacattcatttaataggcagtagatgtttttgagcaaagggaagagctgtgctttaagaagtggtgttagggttgatggcagagggaggagcctggaaagggcctctgacaacagtctacaggcagattagcccaggtcggcatgggcaggagggagctggggaacattttgagatgacagagtcgaggagacttggtgactgcttggtgaggggatgagatagagaggaatcagagatgctggggctgggggactgggaagatgatgatgattagcaatgaggagttgggctgaaggtggttttggaaaccatctgtgtgtacagagatgattgttcaagtcctgcctcttctcttcaccagtgtttgactttgggcttacttaatgagtctcctgaagcctcagtttcaacatctctaaataggggtaaaaatgtctttcattggctttaggccaatgtctctcccatggaaagtaacatgcaacagctactgccaatgctgccaccattggaactggacatagaccatcctggtgagcagtgccctgttcctggttttattccagttaaagtaatttcattcacaggcttgtggggcccattcagattgagtaacttgtttgctcattggggcataacatctgcgaaactaatgacaatatccctcaggctctaactggaaagctctgttgaggtcagtcttcttcctctaagtgtatctgtttgtctaagctctggttggccgtagctgttgctaggctgattctgttttaagcaaaattagaaagtcgatatgaactggttatactagactgccttctttaggaaaaaaaaaaaaagctctctcttgattcatcttcagtttgctatttcaaaatcacatagttatgatatgaatatgcaacattgtgttaaatttaataaaaatgctataaaaatggagtgttaatttatagatgattctcagatattgtctaagaataaaggagagaatgtgtgcctcaaaggagagctgcatattgatgaaatccttttccgctgtggaattggtgctctctctaaatagatgattttggccttggtttaatttttacaaatctttatagaatattaagtaatattttatagacttgagatggctcgggctgtggaacagtagataatctctccatgatcctgcccaacgcagaccttggttcagtagggaggaccttggagtgcacggtttgggagcagaggccacccatggtgaggagaggggccctagaaagctgacttgctcagccttcttcaggattccagatgagtcaagacaagccctggcatggagataagaaaacactacctctgctgacctcctgtgagatggcttctattttggcctcttccaggatccctaggtccatgtagaatatatttaagaagggaggggaaaaaaagaaaagaaaaagtgccttagctaaccctgaaaaacaggacaaaaacagtaagcagagatagcagttgctggaagtttggtgctgcagacggcgcaatctgccatcccatttgttgatctcgcatgccatgcttcagttggcaccgcggctgccaggaaccaccccctccttttccatctgaagcaggaaaagcagtattataacagtgttaactcttcctgccctacagcctagagcttcttcttctgcactggaggcttactaatctcggccacgttaggacctacagagatgacagaatcgaagaattttagaagaggaaggggcctgagggaatttttagaaaaagaaaagcagcacttagtcttcccagattagactgcatgtgacagtggggagaggtcatttgaattttgaagaatgatgaccactaaggaaatctattttttaccaggatctgatctaaatcctggcaaatcaacacggatagctggaggtgggacagggctggagaagcctactgagctggactcagagaaaagcaagaccaggtagatggaggtgaaacggcaaggcctaggaagaaaaaaaacaatccagcacccttagaagatgccatgacattttaggaggtaaattgtttagtcctggtaacaatttagggtacaaaatgcaaatattaattaaataagcaatcacttaaaatcactcataatgcctttcctgtcttgtttaacatgcttttatggaaatgggagaagagagcccaattccaggaacatggtgaagtccaaaacttattaacatcactgttatcaaatgtgcgagggagatggcggtttagattgtaaaagatactgtgaatagctttattcaggttaaagaaatggaagttatcatttttaatgaattagttaatttgtatatataaatgcttaggacaatgcctggcacatcatgagtactaataagtactgtgtgttagttgctgctgttactgtgctgttattattattaattattaggattttcagaactagaattcatatagtctttcagcaggaaacatgtatcaaagttcacacaaaaattctgtttatagtcctcagcttagaaaatatcagatgaagttcttctttaagatgcttaattcttggaaataccctctgtcctggttggaaaactgattttctgctactctgttgggtctgatcagggtggaggagaagctaccaactcagagcccagggcagggcctttgccaccaggcattacttgaagtaaccctctgttttatgtgaaatgggattcaagtattataatcaaattgtgtgtgcttgttttagacttaaggcccataaatatcccatagcttctttagggaacagtcaggtaattaaagaatgagaagatgacccctggcccaggaaggagatagtcccagatgctctctcaaactaatcctcttcaaactaaaaacaggccgggcacagtggctcacgcctgtaattccagcactttgagaggccgaggtgggtggatcacttgaggtcaggagtttgaggccagcctagccaacatggtgaaaccgcgtctctactaaaagtacaaaaattagccaagtttgatggtgcatgcctgtaatcccagctacttgggaggctgagacagaagaatcacttgaacacaggatgcggaggttgctgtgagctgagattgcaccactacactctagcctgggcgacagagcaatactctgtctcaaaaacaaaaacaaaaaaaacaaacaaacttagaaccatttgacccagaaatcccattattgggtatatacccaaaggaatataaataaatcattctatcataaagacacatgcatacatttgttgattgtagcactattcacaatagcaaaggcatggaatcaacgtaaatgtctatcaatggtggattggataaagaccatgtagtacatatacatcatggaataccatgcggccataaaaaagagtgagatcatgtcctttgcagaaacatggatagagcaggaggccattatccttagcaaactaacgcaagaacagaaaaccaaataccacaagttctcacttataagtgggagctaaacgatgagaactcatggacacaaagaaggggacaacagacactgggacctacttgagggtggagggtgggagaaggaagaggatcaggaaaaataactattggatagtaagcttagtacctgggtgacgaaataatctgcataccaaagccccatgacacaagattacccatgtaacaaaagtgctcatgtacccctgagcctaaaaagttaaaaaaagagagagacttgtcttctgctgcctgcccaaccccatgctcccttccacatatctctgcatctcacagcttccaaggttgaactcagattctttcatgataactctgctgaacctgacactgttcccagagcatcctcttttcaaaactctggtgagactactaggcctgtgccactgagtttattgctattagttagcattttattgataggacatgaaaagagttcacagaaatgcccgaatcattgctcagtacaatttgtgctttgcctgttgtatctcatgtgatctcacagtaagaattttgtctccattttgcaaacaagttaatggatgtacagagaggccaagcatctgtgtgagtccagcctgcctggctgtgacctgggactcataatcccctttcacgtctcgcttcttcctttgccgttttagtctttgccgtttccccacatatgttagccttgtcttctcagtaggtgagaagctcttcatagcactgactttcagacttggttatgtgtgtgtattcctaggccctggcattaagaacttacctgaggactaacattctatttcccggggtggagtcaggagcagggtctcctaattggacgaccactatggctggttgaatgctgtgagttgaaatgtctccgaaaatgaactctctcctggaccatctccagtttttgctgtagcattagctgctgtccttccttaatgtttggcaaatggtttccggttgtgcaagcagcagcctcgcttcttctctgccagtgagtgtcagggaaaacttttggattttttagcaagaacaagcaggaacaagttggtattggcagagaaggcctaggtaaatccaaaagttgtactctgcccccaatcctccccagtttcctggccacacccgacgcccctcacggggcccctggcgtcgcacctggacatgcgctcctcgatgaaaacgtgcccagcccttggccctttgtccccttttcttaaggctactgctaactactgatctgatcaacaaagtcacgtttatggtcgtcccttctggtgacatatttgcttttaaaaggagataattctttaactgttctgcaagaaggcaaaggaggagaaaaagtacacgacaccctgtgtgggaagcagatgttggtgtagaaaggacactagagtctgggtcaccctggaatcaaatcctgaccttacccttcaccagccatgtgacctgggcagcttctccaggccctagtttcttgtctataaaatggcatagtgcctggcactgtatatatagatatagatataataccatccaggccagttgtagccctccaatgagtattcctttaaaatctcctcctcccaggtcacctccattgacacccatggggaaggctgatctggactcatatgtggacattgttgtcaaactaaaaacacagtgatttttgtatcttgtttagttttaaaatgttcccagcttagggtttgtaaaaacattttaaaattgtgaaatatagcctatatacagaaaagtgcataaaacgggtatgcacaatttagcaagtaattataaaggtgtcactcatgtaaccaccaccctgggtaagaattggtaggtactgccttaaagtagtgtagctacgtaacacagcgcttctccacagggggcaattttggctgtcacatctggaggggtgttgtcatctagtgcgtggaggccaggtgtgctgccaaacgctctacaatgcacaggacacctccccacaacaaagaattatccagtcccaagtgtcaatcctgcccaaattcaaaaacaccatacttcagcaggagacgaaattttaaggaaagatttggaatttcaagaaaccggctattgtcaaaacttagatttacatgactcatttttagtaatgctgtcccactcaactaattgttctctgaaggagataaagaaaggcgagccagaatttaagatgaaggatctgaaggtaatagacgttgctgatcacatcaatcagtttgtattctttcattgctgccaagtgcttttaatctcctttgtcactttgcactgatcttgagaatcaaatactgtacaagtgagccgaagccagacgtgttccattttactattaatgcaattgtgaataaattaaatactatcttcttccccacgatgtgttccagccccctttgcacttttgactctgtctttcgtttattgcaggatttagtcgtccgtgttgtttttattcttggcaacctgacggcaaaaaataaccaggctcgtgaacaattttccaaagagaaagggagcatccaaactctgctgtcattattccagacgttccatcagctggatctgcattcccagaagccggtgggccaacgaggcgagcagcacagggcgcagaggccgccgtcagaggcagaggacgtgctcatcaagctgactcgtgtgctggccaacattgccatccacccgggcgtgggcccggtgctggccgccaacccggggatagtgggcctgctcctgaccacgctgggtgagaaccgcagcccactggctgcagcagacacaaccaactttcccgcggcccaaagacagttctgtgtctgtggtgtgatgaggattttattatcacaagtggctccctatgagaaagtcttagctgtatgaaggaaattccctcttctgttcagaactgtcttaaaagtaatccagattattagaaaaggaaaagaaaacatagtaatagagattattactaaaacccaccaaatcgtacactttaaaagggtgaattttatggtttgtgaattacattgcaattttttaaaattatactcagcaaatgaagaaaacttggctaaactaaccacaaagagtttaaaattccaaatatttgagtttaaaatcccaaatcccaaatattgtgggcaatccacatgattaaaattaattccttttttttcctcttcaggttcttacattatttgtaattacagtctccagtcattcaagtcctattcattccccttgtattagctcagattgccataacaaaataccacagattgggcaactttgtcagaaatttatttcttatgcttctggaggctgagaaattcaagatcaaggtgccagactgttcagctcctggtgagggctcttcctcctggcctgcagacagccacctactcactgtgtgctcacatggctattccttggtgcaagcacttgtggggtaggggacagtctgtctctccccctcctctttttataaagtcaccaatcctatcatattaggaccctacccttatgggctctgtaacctgctgtatctcttcaaagtcttatctccaaatacaagcatattgggagtagagcttcaacatatgaattttgttgggcacacaattcagtccatggcaacccctatactttttaggtctgtcatctcccacaagcacttctgcctgctagtgtgtaggaaaattaactgcaacccaagattgattaatcttgccactattaggtgggcctggtggctcaggcctgtaatcccagcactttgagaggctgaggtgggtggatcacaaggtcaggagtttaagaccagcctggccaacatggtgaaacccctttctctactaaaatacgaaaattagccaggcatggtagcattcacctataatcccagctactcgggaggctgaggcaggagaatcgcttgaactcaggagacggagggccgcagtgggccgagatcgtgccactgcattccagcctaggtgacacagtgagactctgtctccagaaaaaaaattagctactactaaccatacttgtggaaaatgttgttgttttggaaggaagctaatgtctgacacaaatgatgttttggaggagcaatctgtgaactccctggcctccctcgcccccactagtcaactcaagagccatttcctaagctctttctgggtaaccagttctgtgctatacattcagtttcatttattctgctcaggctgccataacaaaatcccgtaaactggggagcttcaacaacagacatgtattttctcacagttctggaaactggaagtctgagaccgagatgccggcagggtcagggtctggtgcaggctccccttcctggcatgtggttgattgccctctcactgggtcctcatgtgctgaagagagcacactctggggtcccttctacttcttgtaagggtaccagctccaccggatgagggccccacccttctgacctcatttaacctttatcacttccccacaggatctagctccaaatacagtcacattgaagggatagggcttttacatgtgcattctgggggataccaacattcagtttagaacaaggttttaaaaatggaggctggtatgtgctttcaaggaattcggcctatatggtggagggacattgagtgcacagacaagaaccccagtttctgagaagggcagaagctaggcatacacagctaagggacgggtggcagagcccggctgcgggcatgtgagtgacaaggccgtgcttcattatggagctttacggttgaaaacgcattttcatatctgttacctcacaacaatgtcagggcacgtttttgttattttcatcatttcacagatgaggaaacgggctcagtgagatatagtgactttcacaggtcacaaagttagcaagtggcaaagtcaccgggcccctgacctgtgcttccccgcactccacatcacgtgtcacctgtcttgagaaacgactcttcacttctgattgggatctgcaccatgacttaccacttccatgtaaataactcaaaaatctctgtgtttaggcttgaactcttttccaagctgctgactgcacattaagccacgtggaagaaaatgcacgtagctgtgagagaaattcagtttctgttccaacctcaaaacgttcagcatttgctctgtagcatgcccatgtctgctgaagctctttccccttcctgagatccactcaccacactgagcagggcttctcagcccaggaccagggatgggactgctgcagaatcagctgtgggactctttaaaataccctttttggtttctggcccctgcccagaaactgcctctgtaaaatgccattagagtcttgaaatctgccttttaatgcctcctttgcccccaggtgagccttttgcccattaagtgttgagacccagtgcttcagggaaccatgttagcttttctggctcctcaggatctagcagaagcctgaaaccgactgggcgaattctcatctgttgcagaattaatccctttacctgactgtggctgcccaggaagggcctgaggaccagacctcaaacacctggactgggggcacatggctgtgaacagccaaggagtagagttatgcatgattcattttcccacagttgttaatattcacatataaagtgaaaaaactcctcatcttataaatattttatgagcttagaaattacatttctacctataaaggaagagtgaataacttgcttttgactcaaaagaaagtgatgctttggggtaggagaaagaggcaagaggctgggcacggtggttcgcgcctataatcccagcactttgggaagccaaggcaggcagattgcttgaggccagggattccggaccagactgggcaacatggcaaaaccctgtctctattaaaaaaaaaaaaaaaaattagctgagtgtggtgggacacgcctgtgatctcagctactcaggaggctgaggtgggagaattacctgagcccaggaagtcaaggctgcagtgagccatgcttacaccactgcactctggcctgggcaacagagtgagaccctgtctccaagaaaaagtccgggcgcagtggctcacacctgtcatcccagcactttgggaggctgaggtgggcagatcacttgaggtcaggagttcaagaccagcctggccaacatggcaaaaccccatctctactaaaaatacaaacattagccaggcatggtggcacgtgcctgtagtcctagctactcaggaggctgaggcaggaggatctcttgaacccaggaggtggaggttgcagtgagccaagatcgtactgttgcactccagcatgggcgacagagtgagactctctctctaaagctccctggctgctcctgatacaggtggtcaagggcctccctgtgagaaatgttttagtctctgtattagagcctggtaccatatgaggttgagcagaagtgaagaaaccctgctctcctgtgatgggtcaggcctcttgcctactatgccttaggcagttgtttgggcaagcaggtgatcccttctctattctctcctgaaagactttatctccaaataaaagttgatagaagggcaaaagtcacccctgacagggggtcacccccctccaccttccccttacacagctcgactcctgggtgagtttctaagccctgctaagccctttctacactggtctctgtggatttcctacctgttttgtctgtgtcggtgtggagtggtgaccacattccaggaaaggcctcctgccccctctgacaggcctggcagcttagagcaacgcagggccagtgctgggctgtgactgtgactatagaaagggcctgcccgtggtttggttgtgcccactgaactcagagttgctgctgtcctgtttaccctcagagctgagcactcctcccagcctgatggctcctgtggcatggcccccttccctagtcatgtgggaagggcatcccttaggctcttttcttcctacctccctctagccctgcacccttcacaaggagttacttgtaccccaggacttgcctagagaggtcagcctcattgcagagggtcttttaaaaatcaataatgtttctagtaagaactgaccctctcagtatgccaccagactcagagatttgctgacttagtggcaagtccaaattccagattgtctcatatccgtgagtgaattatagagggtaggatggttgtcatggttttttggaagcagtctattgccccaactagctccaatgggaactcagcaaccctgagtccttggcttccgcagcgttctgtggaaagagtaggatagtaggggtcaagtacacctggatttagatgtgtgctctgtgaagtgaggtgaggtattgaacttctctaaacctcagtgttctcatctgacccctaaattcatctatgaagtcctaacccccatgtgatggtatttggagatggggcctttgggagataattaggtttagataaggccatgatgtggggacctcatgctggagttagggcccttacaagaagagacaccagagcctgaccatgcagcctccctgatcttggacttccagcctccgtaactgtgagaaaataaattcctgttggttcaagccacccagtttatggtattttattatgacaggccaaggtgactgagacagatgcacctttcgagaatgaattattgtgggtgtgaattcttgtaagtgcatgtaaaacttattagctgacttttgagggttacatgcatggtaaagtgcctagtgctgtttatgataaatgcttaggagctgtgagtacctaccctctagttccagataccagacaccattcctgccgcccaaatgtgtggtccttcgggaggtcagacaataagagctaccctgcattttctggacaagctaacgaattctcctaccaaggcaagagaaataaaacagatccccaaacactgcccaagacctagtgtcatcagtctggggctggaggaaactagggctgtaggccctttgcccaagagttagacattcacctgagctgctccccatgagccgtcattctggatggcccatctgttcatgtaataagcacttacttagcacccactatgtgccatgcactcatttaagcccttgaatgcatttaaactttgtaacaactctataatgtaggtgcaatgatcatgcttactttaccatcaaggaaactgaggcccaaggaggttaaataatttgagtaaggtcacacggccagtgagtggaagcacagggttctggctccagagtcctggccaaagcaagagggaataatttggaggtcctgtgtcccttcttttaccataactagaatatttccttacagtagaatccatattgataaccaaaataattcagttccttattccctttttatatacttaaactaaaaaagaggaagtcaggtctttatttattctttctttttccaagtatccattaagtgtctaccaggtactgggcctatgcttgctgctctagcgggaggggccactggcggaaggaacagtgtatgtcttctgcagcctacaaatgactgagctttcctttcaacatagtaatttataaaaaggctgttctctttaatgaacaggaaaagatggccaaagggggcgatacttaagttggagaattcaagaacaagcacagtcctcttcctcagctcatagcccccctgcttgctccccaaagaaaaacttcggtttcatacaggaaagaaaaggcacttcctattcagtaatgggaagtgggcaagtcatgagccaagttgtgtgcaggtgctgagtggcctccctcgcaggctgggactgggcctctggagcaggtgagaccaggtggagaaggactgggggctctcccaacagtgggtggacttgtgcaggagggaggggaggcggtggcctgttcaagctgcagtcactggctcagtgttgccgggctcgtgattctttctctgattgcccagctcttttttatttatttatttatttatttttatttttatttttgagatggggtctccctctgtcacccggactggagtgcagtggtgcaatcttggctcactgcaacctctgcctcccgggttcaagcaattcttctgcctcagcctcccaagtagctgagattacaggcttgtgccatcaagtctggctaatttttgtatttttagtggagacggggtttcaccatgttgtccaggctggtctcatactcctgacctcaagtgatcagcccgccttggcttcccaaagtgctgggattacaagcacctgacaccacacccggctaattttttgtattttttgtaaagacagggtttcaccgtgttgcccaggccggtctgattgcccaactcttagatccaactgtctacccctcctctcctgggggtgcttcagaagcacctcagcatatcttaagctgaattcatgacctgtccctgaacttggccctcttcctgtgcccttatttcagacaatgtggtcaacatctacccaattatgtgcaccggcgggggacaccccgggtgattcctctccctcacacccccatccagtctctgccaagcacagtctccactccgccacatctccgccatcacccgtgtccacgctatgctgaggtcactgggaccactcccagctgcagccctgcctcttctcatcctcacactgtggccagaaatgtcaagagatgagtctggagactgagtgggaggcagggacaaaaaccactaagggccttatgtgctaagctagaggatcaattattcttgcatccagcactcactatgtgccaggcactgttctagaagctgggaatgcagccatgaagaaaacagacacatccctaggcctcaggaagctgacattttagggctgaaagacaaacattaaacacatatataacatcaggtggtcatatgtgctatggagaaaattaaagcagggtgagaaaaaagagaataggtgctattttaaatagggaggttacggaaagtatgtccaacaaggcggcatgtaagcaactgctaggaggacgtaaggagtgagccaagtgactaactgggaggacagtatgttccagaagaaagttcagcagtgcacgggttctcaggcaggggcatgctggcatattccaagaggccaggaggctggtgtggttggccttgggggtctgggagtaggaggagcaaatgaggccagagagataaggcctggagctgccaggtaggtcttgtgaaccagacgacgcagtctattcgtgggttatgaggtgggtggcagtatctgacttgcttttaaaggataactgtgttgagaatagatttagggaggcaaaagtggaagaagagaagccagcaagtgctgagagatgaactagtggggaggtagaggaggccagaggtgtcttctagagttcgtagtcacagacggatcgtgaccccggggccgttctgttgggaggcggtgtgggaaggagggcacagactccaaggaggagcccctgggagagcctgaagacccagaaaacaggcgggattggagatggctccgctcactgccgtgttggcccctttgctttacttcagacacaggtcccagatcagctggacttttccagacctcctggctgcgaggattgagttgacagtgtcctctctgctctggccaggagcaggcccttgcatttggggcatttccgtgcaggaggagtcgggggaaatcaagtggtaaaggtgcctctccagggcctttgtagggaccctgcgtgatcgcagccggctcctggccctgctgttgctgtagttgcaacgtagttggttctactcctgcagtgggtctttgactcccttatccttacttcatttcagaatacaagtcacttgatgattgtgaggagctggtgatcaatgctacagcgacaatcaacaatttatcttactaccaagtgaagaattccataattcaagacaaaaagctatatattgctgaatgtaaggttcagagttggatttggataaatgagtgctcatttgaagtttcgattttattaactaaacacagagcaggagacattactatcttctgccttctggtacagaaatgtcttagagcctgatgattctaagaaattagaatatggggaaactagaaatgggaaaaattagtttcttagttcttgctaaagtcccttacagtttgtaatttattatcatttgaaaatcatcagtattaagtatgatgttgatttccattaacctttaagttaaaacttaaattcactgatttaatttctctggtcgccaaatccagtgctcttaaagcttcttgtcagtaacaacatggatggaatcctggaggctgtgcgtgttttcggaaatctctcccaggaccatgatgtctgcgatttcattgtgcagaacaatggtgagttaataacactagaattcataaacattcactttttgccaataatcagctgagtggttttgcagcttgagtcattacagtgttatacttgtttccgttttgagatttgtaaagcttcgtgtttaaggctcctggctcaggatgccaagatggacctaggcagtgttcccctctgccttgtgaatggccttctgtgctccaagatggggtgtgtgtatgtctaatggaaacagtgaatcttgagtaatcacttctgtctgggggcatattcttaagaagacattctcttttatgtactagaatgtctattacattttgcttataatagcaaaaagtagaaacaacctaaatgttcctcaacagagaagaggacaaattcattatggtatattcatgcaataaaatgttctctagcatttaaaagcaataggaggatatatgcagaggaatgccttgaatataagttttaaaacatacaaaactaccttttgcttctgcattggtattgcttctgcacaggtattcacgtagtgatgctatacagtataaatagtaattggaaatagtaaactccaatttaagacagagttcaggctgggtacagtggttcaagcctgtaataccagcactttgggaggctaaggtgggaggattgcttgagggcacgagtttgagatcaacctgggtaacatagtgagaacctgtctctacaaaaatttaaaattagccagacgtggtggtggcacaagtcccagctacttgggaggctgaggcaggaggatcacttgagcccagaagtttgaggctacagtgagccatgattgtgccactgccctctaggctgggagacagagcgacactctatctctaaaaaataaaaaaaatttaaaaattaaaaaaggacagcattcacctttggaaagaaagggatgtccaaagattataattggacctataatgttatttattatcaaataagaattgtttatatttattatgtacaacatattgtttggaatgtaatgttttatttcttaaactgagtggcaagtacccacatgtttataccctttgtatgtctcaaatatttttgtatgtctcaaatattagtatactttgactctttgtatgtctcaaatatttcatgtaacaataattttaaaaacataactctccatgttcgtaatggaaaatttcaataatacagatacaaaaagcagcagcagcaaaccatgccccatcctctcactacctgcagataactgcacattttgctgggcactatttagcctcttaagagcacatatgtacgtgatgttgcctctgtcaagcttactgcccaacccagttaacagggccggggctagaacagggcagcccctctcaggtgcacgtactgtgggaggaggcagaatgcacactttactcactcttccccaaccctttgctcagcgtctgctgagggatgagaaaacaggacaaacagttcccagttccatttcctaggagtaagggaaaatgattctcctgaggcaggagcctgtcctgccttgagatgtccctacactggaaggcctgccttgccccaggttggtttttagcagtctgagtcttacacatggccctgggagacttcaggaatgatcccaccaggagccaactcccctctccaggactgtgtatttaaagacagacagttgctgctggaggtttaggaacacccttgagaataactggaagttagatgagtgtcacctgtgctccctcctttccaccagctgggactctttcactgccgtggagaagcagctgctgcctgggtcaggttttgcagtatctgtcgattgggggagccaactctgggagtggtgggtattggggaacccactgctgtgtgatggataaagccttaggaagaatgagttaagtcccttaacaggggttctgggtttgcaagccactccccgtttccccataccatctgtaaaacaagagacagctgggaatcctgaacttttactggtctgcatttgctctcttccctcgtagtccacaggttcatgatggcgctgctggatgctcagcatcaggatatctgcttttctgcctgtggtgttctcctcaatctcactgtggataaagacaagcgtgtcatcttgaaagaaggaggtggcattaaaaagtaagtttcagggcgtagagtactgactctctcaggatttgaaggacatcattttcttgggagctttggccctttcatcattcctgtggggcaaaggtatttcaacattgggaagcccctaagctgaggctaaagagggggtttagattccactggatacttaaaatagtgcagaagtaggccaggtgtggtggctcgcacctgtaatcccagcattttgggaggccgaggtgggcagatcacttgaggccaggagttcgagagcagcctggccaacatggtgaaaccctgtctctactaaaaagacaaaaattagccaggcgttgtggcacacgcctgtaatcccagctattcaggaggctgaggcaggagaatcgcttgaatccgggatacagaggttgcagtgagtggaggttgcggtgagccgagatcgcgcgactgcacttcagcctgggcaacagagtgagactctgtctcaaaaaaaaaaaggtgtagaagtagattattgctactttataaccacttaaatttatagataaggaattattttaagtgatcactggattatacttacatatcacagaaggataatcattatgctaacaatattaaaattaaagacagattctgacctaataacttctcaatttgaattttattaactcaggttagtggactgtttaagagatttgggtcctactgattggcagctggcctgcttggtttgtaaaactttatggaacttcagtgaaaacatcactaatgcttcgtcatgttttggaaatgaagacaccaacacactcttactcttgctctcatcatttttaggtaagactcttgactatgatgagtctgtgagttttatcagagtgtgagatagtttttttctgtgacctgttcggataaatattagtatgcatttaggtgactatatttctataagcaacaagagtatgttaaagattactataatttggaactgaaaaggctgaatgctatttacagtggggacagaaggactttcaactcattagatacattcatgatttcttctatggcttttttttttttttttttgcattttctctagagtgcataaatataagacctcagcgtaaatgtacttctgttgttcaaaagcaaatagacactattgtaattgagaaaatacggctaaaatctactcaagtcatgcttttaaatgaagctatacattttaattagctacgttaattatcatgtgggtgagggcctgtgagactatttggcattacaatggagtttatatccttgaaaggtaggaaatcactgatacaaatcaaaggaaagaagattgtttctttcttttcttgggacagggtcttgctctgtcatccaggatggaatacagtggtgcgatcactgctcactgcagctctaaactcctgggctcaagtgatcctcctgcctctgtctctcaagtagctgggactacagacacgcaccaccatgcccagataattaaaaaaaaatttttttttttgtagcgatgaggtcttgctatgttacccaggctggtgtcaacctcctgggctcaagcgatcctcccacctcagcctcccaaagtgctgggattactggtgtgaaccaccttgcctggccaggatcattttttacatttaaaaaatttttataattttaggataatttttttcttcctgggttaattctaaaaacaatgatttgggtcagtaagtgagtgtttttaataatcctttttcccaaatagaggagatgtacccatcactgcccagccaccatactagatccaggaggccatgtggaaaggctcaaggtcacttggaagccataggtgctgagtttttaaattttgagctcaacttctctgcaacctgagaaagcttaacagacacctttcctttacactccttcactaaccagagcagaggctcccaatcctggctgcagagcagactcacccgtggaacttttaaaaacacagattatcagccgttccgaaatgatattttatcatctccaagatgaggataattaatgtccagattgcagggtgataaatgagcagatgtgtacaaagagcctaacacagtgcctgctgcatagcaagtcctcagaaggtggctgacgtgctctggaaactctttaagtgttgtaacaccgtgctactaaacagaaactggaactcaggagttgtttgaaataattgggtttgctaggttgatgtgaaatttggtttttccaggtaaatataattttgtacatgtgttttaaaacacaataaggaaaaaaaagtgagcatttttttttaatcattgaggttcacagtcggctccatgagcattaaactgactcaggttgcagggagcagaagtgcatgttcaggttgccttaattcagttctcgatggtggtagagcattgaaatcagctgtggagttaaaacccaaaaaaactaaaaacaccttcctggccccagccctaggaattctgattcagaagctctgggatgaggctgagaatctgtgttcaaagttccacaggtgagtctattagctaagattgagagcccctgctctcgttagcaaaggagcttaagggaagagtgtacagagaagaaagaagccaggaaacaagatactgctcaaagcctcccagagaggcaggcaggagccagagtcccaagtgacccctcagccgtgggcgtcatgagctccgccccctgggctctgccattctggagacccagctgtgttgtgtctgctgttagggaaagaattctctccccacttactctctctaggctccttctagatcatggcttcagctacctccaggcttccacttgctgccctccctgtgtctgtctgttgccagggcactttcctatgtcacccactccaggagaagatatgattggctcagtgagtcactgtcctatggcccagggctttcccgcataggcagcagctaccgggtgacaggctatctgtggtttcctttgttacccaagcctggggcaatcagccataaataacaaggatggtggggctgcggggccggggccgtgtggcataaagatggatcagaaggaggtgtgggcatggctggcttctcagcaggggcagtgtacctggaaggcacttcattttagtgggccctgctgcctgttacagtcaccccttggtatctggggggattggtttcagggcctgcctcagataccaacacagatgcccaagtgcctgatataaaatgacatagaattggcatttcacctacacacatcttcctgcacacgttaaaccatctctagactacttataatacctacagtgtgaacgctatgtaaatggttgtcgtgctgtgatttttatttgtattctttttattgttgttgtttcaaatattctgtctgtggttggttgaacctgtggatacgtggcccgtggatgcgaagggctgactgcgctccattcccaacttttccatagcctaactgggcttctgattgtgcttctcccgcctctgtgcctttgcacatgttctgtttcatttcctgcctgcccatcccaatctgcctagccaggtgcaggcccttcccacgtagcttctcaagcccacagtcgtaggctagtcataggaaatctatacttcttatatagcaatcagtcatgaattgtgtaacttgtcctgtaattatcctgtattattattttgtgagttttatcttatttcccctttgcaactgaaccaccttaggaaaaggatattgcctcatacaaagaaggtacttgatagctgcatgtggattggctaacaatggtggtacctttgtttcaatagtgctatatccttttaaaagcatgtttattctatttttgaaagatctgaggccatcagctaggtgacagatacggaaagtaggttttaggacagttaagtggcttgcctgaagtcatactgtagcaaaggcaggaattcccatccgaaaacaaacaactagccttgtgttttccagccgctccgttacctagaacacccttactccactgcacctcgtgcagggggactgtggcatggataacagcaaataaacacagctcactcaggaagccaagccactgcaatgcatcccaggtttctcacgtgagctcctcttcacgaaccatggggactgtgccttgtgggctgggtggtgggctgtgctgcctcctggcttttctcttggcaatgagcactcagaccctgacttctgaccgggtcgtggctgggtctgggcagtgggactgctgcgagtgaaatgggcatgtgggtgagagtatacttgcatttcaattcttttacaaagatagctaaaacaaacaaacaaacaaaaacaggccattttggaaacaggatgagctgttgaattaccaaggcctgtgttgaagtatgaacactgtttttgcaaatactggtatggcaatttctatagtaatgtaagttacctaactttttcttgctgagtgactagaaaaaaaggagaagtaatataccctcaacatcgttggaatgttgacagtctttctggaaagtggctttaaaagaacgtggtctgaaacttcccattatactgcagtcatgtcttatgagctcataagcagcgtgttgatgctgaagttcttagtggtgtgctgagcactccagactaccatgagcccctctgtggggagctggcacctgatgaccatgtgtgtagtttattgttgcaaatgggaagtacactaggctgttgtatgttcatcctaagttttgtggcagtgggcacttaggttttgtgacaagggtagagcggggccccacgttcaagttggaggatcacatcaacctatgttgaagagctttcaggtgcttctagaacattcgacaactttgccttataagagaatggtcagggcgatgataaatcccttaaacagccatctgctgctgaacagctagctaggaaatagtgtagtgagtaaaggaagcttttatagatgctgcaggacacaaacttctaatgatgattgtgttgtaatgaccattgatacatatttatattttagggtcttttaattctttctaatactttgccccaaattttagtatttggaagcatgctgtgcctaaagaaagcttaagaatgattggttacctaaataagcacttttcacactgcaggtcaggaaaacaatttagttggttgtgaccagcatctttaaaaaatgaagtagcaaagaaagaaaatatcagaatgtattatatttagtaaagacaagtattataatgtgaaacatttgtttattcatatataagtaggtatatgtatacagagtcatgatgcaaaatactgtgaagcacagtttctaacttatgatgattcaaatcttaaaaagaattaatcaaaggctgagtgcaatggctcatgcctgtaatcccagcactttgggaggacgaggtgggagaatcacttgaggctaggagtttgagaccagcttgggcaacgtagtgagacccatctctactaaaagtgaaaaaattagctgggtgtgtgtgttttgtagtcttagccactcaggaaactgaggtgggagaatcacttgagcccaggaattcaaggctacagtgagctatgattgcaccactgcattccagcctgggtgacagaatgagactctgtctcttaaaaaaaaaaattgaatcatagatctaaatttttactcaatcagcctctgctactctttgcagtacaagttccaaaatttaataccccatgtgatatggcacttttaatgtatgttgctgtgtttactttgaaactttagacctcatttctcttacctgtagctgtttggctattcttgttatcttgtctaacccaatttagaattaatatggtttgagggtggattaactataggctgggcctcaagacaagtaacatggtcttgacattagattttaaaaagccactcacccaacagagattttgctaaaaccactaaatctaaccaaagccctaggagaaagaagggactatgacatgcccaggccacactgctcagccgccagcagcttgggaaagaagggcttctgcaacagaatgcattttctttctttcttttctttttcttctcttttctttttttttttttttttttttgagacagagtctctcactgtcgcccaggctggagtgcaatggcacgatcatggctcactgcactctctgcctcctgggttcaagtgattctcctgcctcagcctcccaagtagctgggactacaggagcccgccacatgcctggctaattttttgtatttttagtagagatggggtttcatcatgttggccaggttgatcttgaactcctgacctcaggtgatccacctgcctcagcctcccaaagtgatgggattataggcgtgagccaccgtacccagaatttattttctatacaacagaattcattttctatacaacagaattttatttttatacagcagaattcacttttcaacaaaatttaatgttcagaaaatctggaaaacagtgagcaggaagatggcctagaaatgtgaaatcactggctgggcgctgtggctcacacctgtaatcccagcactttgggaggccaaggtgggtggatcacctgaggtcaggagttcgagaccagcctgggcaacatggcaaaaccccatctctactaaaaacacaaaaaattagcctggtctggtggcacatgcctgtagtcccagctacttgggaggctgaggcacaaggatcacttgaatctgggacatgaaggttgcagtgagccgagatcacaccattgcactccagagtagactctgtctcgaaaaaacggaatgaaatctgaatcactgagactacctgactctttttgtctggaagtagccaaacaggaagagctctgaacgcaccacatatcacctgcattctcctcccctcagggcccagttatctcatgggtggggagatccaggtttgcttacagggtctccatggagctccttgccgaagtgtttgtgtctgcctggagcttatctcagaactgcatagttgaccacttggttgtgatgagaggaaggtacaaactgggattccagactcccttatcttattttgggtggtgacactaacacccatagtgccaaagtacacagtgaatgtacacaaatattcagtgtagaaaatctgatatcaacagagtcatgaagcattttgtaataggattttcattggcccttaaaaaaaaagtatcggcagctgggtgcagtggctcacgcctgtaacctagcactttgggaggccaaggcaggcggatcacttgaggtcaggagttggagaccagccgggccaacatggtaaaactctgtctctactaaaaagaaaaaattagctgggtgtggtggcacatgcctgtaatcccagctgctcaggaggctgaggcagaggaattgcttgaacccgggaggcagaggttgcagtgagccgagactgcgccactgcactccagcctgggtgacacagcgagagtccatctcaaaaaaaaaaaaaaaaaagtgttggcaatttaagtaacaacatctgtggttgttttaggatttagtggttaccattttagaagttggcctcatgtcacaaatgtaggaagtggcagagctaatctgattggcaggtcagtgcacttttctgaagtctgtcacacagagtgtgaggctcaacatcaacatgtaaaattgctgtggcaatcagcacagaaacctcagtggtcatttatcttcctacttggattgaatatatttatggtcatttatcttcctacctggattgaatatatttatggtgttcccagaattccttggattaagaattgaagttgtacttttgcattttattcttacaagttcttttctgcattatccatgggctcacttgggattctaatactccttgggattcccaaggtctctcagttttcagttatggagagagtttgggggtggaaagttgtctttccaaagtactacttccctgctgctttgaagccagcaaagttctgattttcagtaaagtttaaagtgtcaaatttaactgagctattttcctaaaagatttcctgattccttttatacctaacctttgaagtaattaatttttctatgtacacataaggaagtaacatattaatacgttgtttattctgagaaattgtgatctgacttttagatacaaacttacatataaaaaactaaggaattagttgaaataagggttcagttcaattttggattttttattttttgagacagggtctctctgtgtctcttaggctggatggcggtggcatgatcgtgccccactgcagcctcaatgtcccgtgctcaagtgattctcctgacctcagcctctcgagtaactgggaccacaggcacatgcccccatgcccagataatcttctgatttttttttttttttctgagctgtcactgtgttgcccaagctaatcttgaactctggggctcaagcaattctcctacctcaggctcccaatgtgttggcattacaggtatgagccaccacaactggccagactttttttgaaaaaaatattgcccatttaaattaagataccaaaatagactaattgtaaactaatgggcttggcgaggtagcgcacacctgcaatcccagcactttggcacttggggaggccaaggtgggaggattgcttgaggtcaggagttggagaccagtctgggtaatacatggagaccctgcctctccaaataaaataaaataaaatgatgtattcataaagaacagaagagagtaaagaacttctctgaaatcctgtcttgtgttacgttggtattaaaggacgacccagggtgagtttaactcatatcatcaaaattaaactatattcaataggattacatttctaaataatgctgtaatttaaatttttctaatacagatgaagaactagcactggatggcagttttgatccagacctaaaaaactatcacaaactccattgggaaacagaattcaaacctgtggcacagcagcttctaaaccgaattcagagacatcacaccttcctggaacccctgcccattccctctttctaacatgatgcagattaacagtagaaacgagaactcacgtctccctcattcttaagaactggtaacaaacgtgaacatttttttcagcattaacaaatgtggaaagtttttcaagaactggttttagtgagtagctgaagtattttttaaaattaagcatttcttcttgttaggtattatggaaaaatgaatatacacattatatttcctgttgagagaaatgtaagatgaaaatatgtgcattttcaagtaaatgactttttcttctattctctattaaacaatttagttctagtcttaaaatcttgatttaacaattttggaattgaagtgttcataagttaaatgaactgtgcaatgaaggctgttagattatatagaaagaagggtaggcaacatgagtggaacacgttacaacataggatctgtactaattcttactatgtcaaataataaatgctctcattaggtaccagtatttttttggtctttatattaagagaaggagtaagcagaaaaacttaaagaaaactgctttgggccatctgttctttattaaataagtaaaatagataaaatgagagtatattttcatttgaaataaaatgactggactaagacagtccttctaattgtaactctctgtgtttgacaggtgaggtaatgtattagaaagaatgcaggcttaggtgaatggtatacctgaatctgaatccatgctctcccctgctagctttgtgggcctggagcaagtaacttaatttcttgagctgcaactgcaaaatgggaatcatatcaattttactgtagtgtagtttggaacaaaccattaaatgggcaaatggcccagtccagtgtatcatgtggagtgggtgttcaagaacattatgatggcaagcactttcttagcttgccatcctttgtaggatgagtttggcctttgaataaatgattaaagagcaaaagattgagattactattattatcctatactagccaaatgaagatgagttggaaataaaaataaatttgctggctcacacctgtaattcagtactttagaaggcggagtggggaggatcccatgaggctaggatttcaagaccagcctgggcaacaaagtgagacctcatctcaacaacaaaaagcaaatttactactctgcttggagaaaagcttttataaacagctcatttctcaccctacaaaacaccaagactcatgggatgagagcaggcatcccagactgaatggggttcttgaagcctattagaataaaccagctgggcatggtggctcacacctgtaatcccaacactctgggaggccgaggcgggcatatcacctgaggtcgtgagttcgagaccagtttggccaacatggtgaaaccccatctctactaaaaatacaaaaattagtctggcatggttgcacatgcctgtaatctcagctactcgcgaggctgaggcacgagaatctttctctctctctttttttttttcttaattattatactttaagttctggggtacatatgcagaatgtggaggtttgttacatgggtatacatgtgccgtagtggtttgttgcacccataacccatcatctacattaggtatttcttctaatgctgtccctcccctagcccccaaccccctgatggaccccagtgtgtgatgttcccctctgtgtgtccatgtgttcttattgttcagctcccacttatgaatgagaacatgtggtgtttggttttctgttcctgtgttagtttgttgagaatgatggtttccaaattcatccatgtccctgcaaaggacatgaactcatcctgatttatggcttcatagtattccatggtatatatgtgccaaattttctttatccagtctatcattgatgggcatttgggttgattccaagtctttgctattgtgaacagtgctgcaataaacatacatgtgcatgtgtctttatagtagaatgatttataatcctttgggtatatacccagtaatgggattgctgggtcaaatggtatttctagttctagatccttgaggaattgccacactgtcttcccaatggttgaactaatttacactcccaccaacagtgtaaaagcattcctatttctccacatcctctccagtatctgttgtttcctgacttttaatgattgccattctaactggcgtgacatggtatctcattgtggttttgatttgcatttctctaatgaccagtgatgatgagctttttttcatgtttgttggctgcataaatgtcttcttttgagaagtgtctgttcatatcctttgcccactttttgatggggttgtttgttttttcttataaatttgtttaagttctttgttgattctggatattagccctttgtcagatggatagactgcaaaaattttctcgtattctgtaggttgcctgttcactctgatgatagtttcttttgctgtgcagaagctctttagtttaactagatcccacttgtcaattttggcttttgttgccattgcttttgatgtcttagtcatgaagtctttgcccatgccaatgtcctgaatggtattattgcctaggttttcttctagggtttttatggttttaggtcttacatttgagtcttttatctaccttcagttaatttttgtataaagtgtaaggaagggatccagtttcagctttctgcatatggctagccagttttcccaacaccatttattaaatagggaatcctttccccatttcttgtttttgtcaggtttgtcaaggatcagattgttgtagatgtgtggtgttatttctgaggcctctgttctgttccattggtctatatctctgttttggtaccagtaccatgctgttttttttactgtagccttgtagtatagtttgaagtcaggtagcatgatgcctccagctttgttctttttgcttaggattctcttggctatgtgggctcttttttggttccgtatgaaatttaaagtagttttctccaattctgtgaagaaagtcagtggtagcttgatggggatagcattgaatctataaaatactttgggcagtatggccattttgacgatattgattcttcctatccatgagcatggaatgtttttttaatttgtgtcctctcttacttccttgagcagtggtttgtagttctccttgaagaggtccttcacatcccttgtaagttgtattcctaggtattttattctctttgtagcaattgcgaatgggagttcactcacgatttggctctctgtttgtctgctattagtttataagaatgcttgtgatttttgcacattgattttgtatcttgagactttgctgaaattgctcatcagcttaagaagattttgggctgagacgatgtggttttctaaatatacagtcataccatctgcaaacagagacaatttgacttcatcttttcctaactgaataccctttatttctttctcttgcctgattgccctggccagaacttccaatactatgttgaataggagtggtgagagaggacatccttgtcttgtgctgattttcaaagggaatgcttccagcttttgcccattcagtatgatattgcctgtgggtttgtcataaatagctcttattattttgagatactccatcaatacctactttattgagggtttttagcatgaaggctgttgaattttgtcaaaggccttttctgcatctattgagataatcatgtgttttttgtcattggttctgtttgttatggattacgtttattgatttgcgtatgttgaaccagccttgcatcccagaggtgaagccaacttgatcatggtggataagctttttgatgtgctgctggattcggcttgtcagtattttattgaggattttcgcatcgatgttcatcagggatattggccttaaattttctttttttgttgtatctctgccaggttttggtatcaggatgatgctggcctcataaaatgagttagaggggattccctctttttcttttgtttggaatagtttcagaaggaatggtaccagctcctttttgtacctctggtagaattagactgtgaatctgtctggtcctgggctttttttggttgatatgctattaattgctgcctcaatttcagaacttgttattggtctattctgggatttagcttcttcctggtttacccttgggaaggtgtatgtgtccagcaatttatccatttcttctagattttctagtttatttgcatataggtgtttatagtattctgtgatggtagtttgtatttctgtaggatcggtggtgatatcccctttatcattttttattgcgtctatttgattcttctctttattcttctttattagtctggctagtggtctatttattttgttgatcttttcaaaaaaccagctcctggattcattgatcttttgaaggtttttttatgtctctatcactttcagttctgctctgatgttagttatttcttgtcttctgctagcttttgaatatgtttgctcttgtttctctagttcttttagttgtgatgttagggtgtcgaatttagatctttcctgctttctcttgtgggcattcagtgctataaattttcctctacacactgctttaaatatgtcccagagattccggtacattgtgtctttgttctcattggtttcaaagaatgtctttatttctgccttcattttgttatttacccagtagtcattcaggagcaggttgttcagtttccatgtagttgagcggttttgagtgagtttcttagtcctgagttctaatttgattgcactgtggtctgagagactgttatgatttctgttcttttccatctgctgaggagtgttttacttccaactatgtggtcaattttagcataagtgcaatgtggtgctgagaagaatgtatattctgttgatttggggtggagagttctgtagatgtctattaggtccacttggtccagagctaagttcaagtcctggatatccttgttaaatttctgtctcattgatctttctaatactgaaagtggggtgttaaagtctctgactattatagtgtgggagtctaagtctctttgtaggtctctaagaacttgctttatgaatctgggtgctcctgtattgatgcgtacatatttaggacagttagttcttcttgttgcattgatccctttaccattaggtaatgcccttctttgtctcttttgttctgtattggtttaaagtctgttttatcagagggtaggattgcaacccctgctttttttttttctttctgtttgcttggtaaatattcctctatccctttattttgagcctgtgtgtgtctttccacatcagatgggtctcctgaatacagcataccaatgggtcttgactctatatccaatttgccagtctgtgtcttttaattgggacatttaacctgtttacatttaaggttaatgttgttatgtgtgaatttgatcctgtcattatgatgatagctggttattttgcccgttgttgcagtttctttgtagcatcaatggtctttacaatttggtatgtttttgctgtggctggtaccggttgttcctttccacgtttagtgcttccttcaggagttcttgtaagggaggcctggtggtgacacaatctctcagcatttgcttgtctgtaaaggattttatttctccttcacctatgaagctcagtgtggctggatatgaaattctgggttgaaaattcttttctttaagaatgttgaatattggccccactctcttctggcttgtagcgtttctgccgagagatccgctgttagtctgaagggcttccctttgtgggtaatccgacctttctctctggctgcccataacattttttccttcatttcaaccttggtgaatctgacgattatgtgtcttggggttgctcttttcgaggagtatctttgtggtgctctctgtatttcctgaatttgaatgttggcctgccttgctagattggggaagttctcctggttaatatcctgaagagtattttccaactcggttccattttccccgtcactttcagatacaccaatcagacgtagatttggtcttttcacatagtcccctacttcttgcaggctttgttcgtttcttttcattcttttttctctaatcttgttttcttgctttatttcattgagttgatcttcaatctctgatatcctttcttctgcttgatagatatggctattgatacttgtgtatgcttcacgaagttcttgtgctgtgtttttcagttccatcaggtcgttcatgttcttctataaacttattctagttagcaattcatctaaccttttttcagggttcttagcttacttgcattggattagaacatgctcctttagctcggaggagtatgttattacccaccttctgaagcctatttctgtcaatttgtcaaactcattctccgtccagttttgttcccttgctggcaaggagtcgtgatcttttggaggagaagaggcattcttgtttttggaattttaaggctttttgtgctggtttctccccatcttcgtggatttacctacctttggtctttgatgttggtgtccttcaggtgaggtctctgagtggacgtcctttttgttgatgttgatactattcctttctgtttgttagttttccttctaacaggcccctctgctgcagttctgctgaagtttgctggaggtccactatagaccctgtttgcctgggtgtcatcagcggaggctgcagaacagcaaatattgctgcctattccttcctctggaagctttgtcccagaggggtacctgccagatgccagccagagctctcccgtatgaagtatctgttggttcctactgggaggtgtctcccagtcaggatacgcgggtggccagggaaccacttgaggaggcagtctgctcctcctcaggagttctcctgaggagaacgcctgctgggagatctgctgctctcttcagagccagcaggcagggacgtttaagtttgctgacactgcacccacagccgccccttcccccatgtgctctgtcccagggagatgggggttttatctattagtccctgactgggcctgctgcctttttttcagagatgccctgcccagagaggaggaatctagagaggcagtctggccacagcagccttgctaagctgtggtgggctccacccagttcaaacttcccagtggctttgtttcatgaaaatctcttgaacctcggaggtggaggttgcagtaagccgagattgtgccactgcactatagcctgggcagcagcacaagactgtctcaaaaaaacaaaacaaaacaaaaaaacctacatttccaggaacaaatagactttctgagaatggttctagtctagggttcatacctgatgtggctcagcaaaatcctctagggacactcgccttattgtagtccataatgtaagtatatgctggtagattcactccaacagatgaaatcagtttaagtcacaggggctaatttatctaaaacattcacagatataatgtatttcatccatagcaagctatttattctacttttagtggaaaaaaaagtcaaactctcccctcgccaaacagcccccttcatatttatgactaatatatagtaactcatggtgggatcccattatacctattctcttccatacttagctgctcccctcagacccacatataagctggaccatttggaaccatctacttaaacaaaacctgtgattaaaaaaacacgtaaaatctaccattttaaccattttaagtgtacagttcagtagtttaagtatattcacattgttctgcaacagatctctagaactctttcatcttgtaaactgacgctatacgcaccaaacaactccccattttcacccccaccagctcttggcaaccatcattctattaatactttccatttctatgaatttgactacttgatatcttatataagtggagccatacaatagttgtgtgtgtgtgactggtttatttcacttagcataatactatcaaggttcatccatgttgttgcctgtgataggatttccttactttttttttttttcttccctgagacagagtcttagaacagtctctgttacccaagctggagtgcaatggcatgatctcggctcactgcaacctccgcttcccgggttcaagtgattctcctgctcagccttccaagtagctgggattacaggcatgcaccaccatgcctggctaatttttgtatttttagtagagatggggtttcaccatgttggccaggctggtcttgaactccaggcctcaagtgatccacctgcctcagcctcccaaagtgctgggattacaggtgtgagccacctgtgccctgctgatttctttcctttttaagactgaataatattccattctatgagtataccacattttgtttatccattcatctgtcaatgaacatttgggttgcctccatatcatgggtattgtgaataatgttgccatgaatataggtttgcaaatctctctttgagatcttgttttcagttcttttgtgtatatactcagaagtgatgtcttagttcaagctgagataacaaaaaatatagtttgggtgacttaacaaaagttcattcctcacagttcttaagactaggaagtccaaagtcaaggtgctggccagttcagtttgtggtcaaggccctcttcctggtttgcagagggctgcctttttgctctatcctcacatggtggagagagagatcatctctcacctgtctctccttataagggtttactgccactcatgagggctccaccctcaagacctaattacttcccaaagaccacagggcttcaacatgtgaattttgggggaatgcaaatattcagtccacagcaagtggaattgctgtatcatatgggaattctatttttaactttttgaggaacctccatcgtgtttaagtggtgattatcattttacattgttaccaatgccacataagtgttccaatttccccacatcctcaccaacacttgttattttgggagttttaaaaatagtagccaccctgatgagtgtgaggtaatgtgtctttgtaatattgatttacattttttataattagtcaggctgagcaccttttcataatttttgtttgttggtcatttgtattatcatctttggagaaatgtctattcaagtctttggacttttctttttttttttttttttggagatgaagtctcgctctgtcaccatgctggagtgcatggagtacggtggcgcgatctcagctcactgcaatctccgcttcccaggttcaagccattctcctgcctcagcctccagagtaatcccagtgggttaccggtgcacaccaccatgcccagctaatttttgtgtagagacgggggttttcctatgttggccaggatggtctcgatctcctgacctcatgatctgcctgcctcggcctcccaaactgctgggattacaggcatgagccaccactcccagccccattttttagttatttggttttttgagttgtaggaattcttcatatattctggatattaacctcttatcaaatatatgatttgtaaatattttctcctatcccataggttgccttttcactctgttgattatgtcctttgatgcacagacatttttaagtctgatgtaattccaatggtctttttttcttttgttgcccataatttctgtgtcatatctaagaaatcattgccaaatccaatgttgtgaaactttccccgtgttttcatctagttttacagttgtcagtcttacatttaggtctttgagttttttaatatataagggtccaacttcattcttttgcatgtgcatatctagttttcctagcaccatttgttaaagagactgtcctgtccttattgagtggtcttggtacctttgctaaagatgatttggccatatatgtgagaatttatttctggaccctattccattggcctgtatgtttgactttgtgccagttccacattattttgattactgttgctttgcaatatgttttgaaatcagggagtgtgagacctccaactttgttctttttcaagattgttttggctattcagggtccattgaagattctagatgaattttggcatggaattctctacttccgtgaaaaatgccattgggattttgatagagattgcattg

SEQ ID NO: 2537 - DNA, 3095 bp, Homo sapiens
atgcgttggcgggacccgcgcaggcccagtggccgagcggcgtcgtggggttaccccgcccgcgccagcgctgcatccctggccgctacccggggagagccggaggatgaattgaacctcgcagccgctgctatctccagtgctcatcacagggtgtggtgtctatctgaagaatattttactttcaaaggaaagatgctgtctccaaatgataaaatgttaggaaaactggatccattttatcaaccttcagtgtccaagcagaagaccagtgcagaaatcataagtgaagcaagaaatgcattaagaacagttagaacccaaagaccatttacaccacaggaggctcaaagaaaactattcggacctgcatcctcaagaacatcagaaaatagacctccttcctccttcagcctccatgcatccagttttgagtcatctgattccaggcctatctctggcacacgtcttagtccactagagctgaaaccgaaagttccagcatctcccaccagagaggaggattcctgcttttcctttcctaagcccccagtggaccctgcgaagattagaagagtaagcaacgccagggctcgcttattcagggctgcctcccagcgggcccttctgccggacagatcccttcctccctccgactcaaagaagacagtggaatccaaagaaacagttatgatgggggactctatggtgaaaataaatgggatttatttaacaaaatcaaatgctatttgccacttaaagagtcacccacttcagctaactgatgatggaggcttcagtgaaataaaggagcaagaaatgttcaaaggaacaacatctttaccatctcatctcaagaatggaggggaccaggggaagagacatgcgagggcctcatcatgccccagtagctcagacctgagcaggctgcaaaccaaagcagtcccaaaagctgacctgcaagaagaggacgcagaaatagaagtagacgaagtcttttggaatacaaggattgtaccgattttgcgtgaattagaaaaggaagaaaacattgaaacggtttgtgctgcttgcacacaacttcatcatgctttagaggaaggaaacatgcttggaaataaatttaagggaagaagtattctcctgaagaccctgtgtaaactagttgatgttggttcagactcgctcagccttaaacttgcaaaaataattctagcacttaaagtgagtagaaagaatcttcttaatgtctgcaaacttatatttaaaattagcaggaatgagaagaatgattctttgattcaaaatgacagcattctggaatcattattggaggtactaagaagtgaagacctgcaaactaacatggaagcttttttatactgtatggggtctataaagttcatttctggaaatctgggatttcttaatgaaatgatcagcaaaggtgctgtggaaatactgataaatttgataaaacaaataaatgagaacatcaagaaatgtggtacatttttgcctaattcgggccacttgctagtccaggtgactgctacattgagaaacttggttgattcatcattagtaagaagtaagttcctaaacatcagtgcccttccccagctctgcacggcaatggaacagtacaagggtgacaaggacgtctgtaccaatattgccagaatattcagcaaacttacttcttaccgtgactgctgcacagccttggccagctattccagatgttatgccttatttctgaatctaattaacaaataccagaagaagcaggatttagtcgtccgtgttgtttttattcttggcaacctgacggcaaaaaataaccaggctcgtgaacaattttccaaagagaaagggagcatccaaactctgctgtcattattccagacgttccatcagctggatctgcattcccagaagccggtgggccaacgaggcgagcagcacagggcgcagaggccgccgtcagaggcagaggacgtgctcatcaagctgactcgtgtgctggccaacattgccatccacccgggcgtgggcccggtgctggccgccaacccggggatagtgggcctgctcctgaccacgctggaatacaagtcacttgatgattgtgaggagctggtgatcaatgctacagcgacaatcaacaatttatcttactaccaagtgaagaattccataattcaagacaaaaagctatatattgctgaattgctcttaaagcttcttgtcagtaacaacatggatggaatcctggaggctgtgcgtgttttcggaaatctctcccaggaccatgatgtctgcgatttcattgtgcagaacaatgtccacaggttcatgatggcgctgctggatgctcagcatcaggatatctgcttttctgcctgtggtgttctcctcaatctcactgtggataaagacaagcgtgtcatcttgaaagaaggaggtggcattaaaaagttagtggactgtttaagagatttgggtcctactgattggcagctggcctgcttggtttgtaaaactttatggaacttcagtgaaaacatcactaatgcttcgtcatgttttggaaatgaagacaccaacacactcttactcttgctctcatcatttttagatgaagaactagcactggatggcagttttgatccagacctaaaaaactatcacaaactccattgggaaacagaattcaaacctgtggcacagcagcttctaaaccgaattcagagacatcacaccttcctggaacccctgcccattccctctttctaacatgatgcagattaacagtagaaacgagaactcacgtctccctcattcttaagaactggtaacaaacgtgaacatttttttcagcattaacaaatgtggaaagtttttcaagaactggttttagtgagtagctgaagtattttttaaaattaagcatttcttcttgttaggtattatggaaaaatgaatatacacattatatttcctgttgagagaaatgtaagatgaaaatatgtgcattttcaagtaaatgactttttcttctattctctattaaacaatttagttctagtctt

SEQ ID NO: 2538 - protein, 924 aa, Homo sapiens
MRWRDPRRPSGRAASWGYPARASAASLAATRGEPEDELNLAAAAISSAHHRVWCLSEEYFTFKGKMLSPNDKMLGKLDPFYQPSVSKQKTSAEIISEARNALRTVRTQRPFTPQEAQRKLFGPASSRTSENRPPSSFSLHASSFESSDSRPISGTRLSPLELKPKVPDTREEDSCFSFPKPPVDPAKIRRVSNARARLFRAASQRALLPDRSLPPSDSKKTVESKETVMMGDSMVKINGIYLTKSNAICHLKSHPLQLTDDGGFSEIKEQEMFKGTTSLPSHLKNGGDQGKRHARASSCPSSSDLSRLQTKAVPKADLQEEDAEIEVDEVFWNTRIVPILRELEKEENIETVCAACTQLHHALEEGNMLGNKFKGRSILLKTLCKLVDVGSDSLSLKLAKIILALKVSRKNLLNVCKLIFKISRNEKNDSLIQNDSISLLEVLRSEDLQTNMEAFLYCMGSIKFISGNLGFLNEMISKGAVEILINLIKQINENIKKCGTFLPNSGHLLVQVTATLRNLVDSSLVRSKFLNISALPQLCTAMEQYKGDKDVCTNIARIFSKLTSYRDCCTASYSRCYALFLNLINKYQKKQDLVVRVVFILGNLTAKNNQAREQFSKEKGSIQTLLSLFQTFHQLDLHSQKPVGQRGEQHRAQRPPSEAEDVLIKLTRVLANIAIHPGVGPVLAANPGIVGLLLTTLEYKSLDDCEELVINATATINNLSYYQVKNSIIQDKKLYIAELLLKLLVSNNMDGIAVRVFGNLSQDHDVCDFIVQNNVHRFMMALLDAQHQDICFSACGVLLNLTVDKDKRVILKEGGGIKKLVDCLRDLGPTDWQLACLVCKTLWNFSENITNASSCFGNEDTNTLLLLLSSFLDEELALDGSFDPDLKNYHKLHWETEFKPVAQQLLNRIQRHHTFLEPLPIPSF

SEQ ID NO: 2539 - DNA, 2437 bp, Homo sapiens
caaagaagacagtggaatccaaagaaacagttatgatgggggactctatggtgaaaataaatgggatttatttaacaaaatcaaatgctatttgccacttaaagagtcacccacttcagctaactgatgatggaggcttcagtgaaataaaggagcaagaaatgttcaaaggaacaacatctttaccatctcatctcaagaatggaggggaccaggggaagagacatgcgagggcctcatcatgccccagtagctcagacctgagcaggctgcaaaccaaagcagtcccaaaagctgacctgcaagaagaggacgcagaaatagaagtagacgaagtcttttggaatacaaggattgtaccgattttgcgtgaattagaaaaggaagaaaacattgaaacggtttgtgctgcttgcacacaacttcatcatgctttagaggaaggaaacatgcttggaaataaatttaagggaagaagtattctcctgaagaccctgtgtaaactagttgatgttggttcagactcgctcagccttaaacttgcaaaaataattctagcacttaaagtgagtagaaagaatcttcttaatgtctgcaaacttatatttaaaattagcaggaatgagaagaatgattctttgattcaaaatgacagcattctggaatcattattggaggtactaagaagtgaagacctgcaaactaacatggaagcttttttatactgtatggggtctataaagttcatttctggaaatctgggatttcttaatgaaatgatcagcaaaggtgctgtggaaatactgataaatttgataaaacaaataaatgagaacatcaagaaatgtggtacatttttgcctaattcgggccacttgctagtccaggtgactgctacattgagaaacttggttgattcatcattagtaagaagtaagttcctaaacatcagtgcccttccccagctctgcacggcaatggaacagtacaagggtgacaaggacgtctgtaccaatattgccagaatattcagcaaacttacttcttaccgtgactgctgcacagccttggccagctattccagatgttatgccttatttctgaatctaattaacaaataccagaagaagcaggatttagtcgtccgtgttgtttttattcttggcaacctgacggcaaaaaataaccaggctcgtgaacaattttccaaagagaaagggagcatccaaactctgctgtcattattccagacgttccatcagctggatctgcattcccagaagccggtgggccaacgaggcgagcagcacagggcgcagaggccgccgtcagaggcagaggacgtgctcatcaagctgactcgtgtgctggccaacattgccatccacccgggcgtgggcccggtgctggccgccaacccggggatagtgggcctgctcctgaccacgctggaatacaagtcacttgatgattgtgaggagctggtgatcaatgctacagcgacaatcaacaatttatcttactaccaagtgaagaattccataattcaagacaaaaagctatatattgctgaattgctcttaaagcttcttgtcagtaacaacatggatggaatcctggaggctgtgcgtgttttcggaaatctctcccaggaccatgatgtctgcgatttcattgtgcagaacaatgtccacaggttcatgatggcgctgctggatgctcagcatcaggatatctgcttttctgcctgtggtgttctcctcaatctcactgtggataaagacaagcgtgtcatcttgaaagaaggaggtggcattaaaaagttagtggactgtttaagagatttgggtcctactgattggcagctggcctgcttggtttgtaaaactttatggaacttcagtgaaaacatcactaatgcttcgtcatgttttggaaatgaagacaccaacacactcttactcttgctctcatcatttttagatgaagaactagcactggatggcagttttgatccagacctaaaaaactatcacaaactccattgggaaacagaattcaaacctgtggcacagcagcttctaaaccgaattcagagacatcacaccttcctggaacccctgcccattccctctttctaacatgatgcagattaacagtagaaacgagaactcacgtctccctcattcttaagaactggtaacaaacgtgaacatttttttcagcattaacaaatgtggaaagtttttcaagaactggttttagtgagtagctgaagtattttttaaaattaagcatttcttcttgttaggtattatggaaaaatgaatatacacattatatttcctgttgagagaaatgtaagatgaaaatatgtgcattttcaagtaaatgactttttcttctattctctattaaacaatttagttctagtctt

SEQ ID NO: 2540 - protein, 696 aa, Homo sapiens
MMGDSMVKINGIYLTKSNAICHLKSHPLQLTDDGGFSEIKEQEMFKGTTSLPSHLKNGGDQGKRHARASSCPSSSDLSRLQTKAVPKADLQEEDAEIEVDEVFWNTRIVPILRELEKEENIETVCAACTQLHHALEEGNMLGNKFKGRSILLKTLCKLVDVGSDSLSLKLAKIILALKVSRKNLLNVCKLIFKISRNEKNDSLIQNDSISLLEVLRSEDLQTNMEAFLYCMGSIKFISGNLGFLNEMISKGAVEILINLIKQINENIKKCGTFLPNSGHLLVQVTATLRNLVDSSLVRSKFLNISALPQLCTAMEQYKGDKDVCTNIARIFSKLTSYRDCCTASYSRCYALFLNLINKYQKKQDLVVRVVFILGNLTAKNNQAREQFSKEKGSIQTLLSLFQTFHQLDLHSQKPVGQRGEQHRAQRPPSEAEDVLIKLTRVLANIAIHPGVGPVLAANPGIVGLLLTTLEYKSLDDCEELVINATATINNLSYYQVKNSIIQDKKLYIAELLLKLLVSNNMDGIAVRVFGNLSQDHDVCDFIVQNNVHRFMMALLDAQHQDICFSACGVLLNLTVDKDKRVILKEGGGIKKLVDCLRDLGPTDWQLACLVCKTLWNFSENITNASSCFGNEDTNTLLLLLSSFLDEELALDGSFDPDLKNYHKLHWETEFKPVAQQLLNRIQRHHTFLEPLPIPSF

SEQ ID NO: 2541 - DNA, 3043 bp, Homo sapiens
atgcgttggcgggacccgcgcaggcccagtggccgagcggcgtcgtggggttaccccgcccgcgccagcgctgcatccctggccgctacccggggagagccggaggatgaattgaacctcgcagccgctgctatctccagtgctcatcacagggtgtggtgtctatctgaagaatattttactttcaaaggaaagatgctgtctccaaatgataaaatgttaggaaaactggatccattttatcaaccttcagtgtccaagcagaagaccagtgcagaaatcataagtgaagcaagaaatgcattaagaacagttagaacccaaagaccatttacaccacaggaggctcaaagaaaactattcggacctgcatcctcaagaactcatctgattccaggcctatctctggcacacgtcttagtccactagagctgaaaccgaaagttccagcatctcccaccagagaggaggattcctgcttttcctttcctaagcccccagtggaccctgcgaagattagaagagtaagcaacgccagggctcgcttattcagggctgcctcccagcgggcccttctgccggacagatcccttcctccctccgactcaaagaagacagtggaatccaaagaaacagttatgatgggggactctatggtgaaaataaatgggatttatttaacaaaatcaaatgctatttgccacttaaagagtcacccacttcagctaactgatgatggaggcttcagtgaaataaaggagcaagaaatgttcaaaggaacaacatctttaccatctcatctcaagaatggaggggaccaggggaagagacatgcgagggcctcatcatgccccagtagctcagacctgagcaggctgcaaaccaaagcagtcccaaaagctgacctgcaagaagaggacgcagaaatagaagtagacgaagtcttttggaatacaaggattgtaccgattttgcgtgaattagaaaaggaagaaaacattgaaacggtttgtgctgcttgcacacaacttcatcatgctttagaggaaggaaacatgcttggaaataaatttaagggaagaagtattctcctgaagaccctgtgtaaactagttgatgttggttcagactcgctcagccttaaacttgcaaaaataattctagcacttaaagtgagtagaaagaatcttcttaatgtctgcaaacttatatttaaaattagcaggaatgagaagaatgattctttgattcaaaatgacagcattctggaatcattattggaggtactaagaagtgaagacctgcaaactaacatggaagcttttttatactgtatggggtctataaagttcatttctggaaatctgggatttcttaatgaaatgatcagcaaaggtgctgtggaaatactgataaatttgataaaacaaataaatgagaacatcaagaaatgtggtacatttttgcctaattcgggccacttgctagtccaggtgactgctacattgagaaacttggttgattcatcattagtaagaagtaagttcctaaacatcagtgcccttccccagctctgcacggcaatggaacagtacaagggtgacaaggacgtctgtaccaatattgccagaatattcagcaaacttacttcttaccgtgactgctgcacagccttggccagctattccagatgttatgccttatttctgaatctaattaacaaataccagaagaagcaggatttagtcgtccgtgttgtttttattcttggcaacctgacggcaaaaaataaccaggctcgtgaacaattttccaaagagaaagggagcatccaaactctgctgtcattattccagacgttccatcagctggatctgcattcccagaagccggtgggccaacgaggcgagcagcacagggcgcagaggccgccgtcagaggcagaggacgtgctcatcaagctgactcgtgtgctggccaacattgccatccacccgggcgtgggcccggtgctggccgccaacccggggatagtgggcctgctcctgaccacgctggaatacaagtcacttgatgattgtgaggagctggtgatcaatgctacagcgacaatcaacaatttatcttactaccaagtgaagaattccataattcaagacaaaaagctatatattgctgaattgctcttaaagcttcttgtcagtaacaacatggatggaatcctggaggctgtgcgtgttttcggaaatctctcccaggaccatgatgtctgcgatttcattgtgcagaacaatgtccacaggttcatgatggcgctgctggatgctcagcatcaggatatctgcttttctgcctgtggtgttctcctcaatctcactgtggataaagacaagcgtgtcatcttgaaagaaggaggtggcattaaaaagttagtggactgtttaagagatttgggtcctactgattggcagctggcctgcttggtttgtaaaactttatggaacttcagtgaaaacatcactaatgcttcgtcatgttttggaaatgaagacaccaacacactcttactcttgctctcatcatttttagatgaagaactagcactggatggcagttttgatccagacctaaaaaactatcacaaactccattgggaaacagaattcaaacctgtggcacagcagcttctaaaccgaattcagagacatcacaccttcctggaacccctgcccattccctctttctaacatgatgcagattaacagtagaaacgagaactcacgtctccctcattcttaagaactggtaacaaacgtgaacatttttttcagcattaacaaatgtggaaagtttttcaagaactggttttagtgagtagctgaagtattttttaaaattaagcatttcttcttgttaggtattatggaaaaatgaatatacacattatatttcctgttgagagaaatgtaagatgaaaatatgtgcattttcaagtaaatgactttttcttctattctctattaaacaatttagttctagtctt

SEQ ID NO: 2542 - protein, 696 aa, Homo sapiens; identical to SEQ ID NO: 2540

SEQ ID NO: 2543 - DNA, 118643 bp, Mus musculus
  misc_feature (1)...(118643): n = A, C, G or T/U
cacaaacacacacgcatactcacatacacatactcacatataccacatacccccacacccactaccacactcacacaatcacacgcagcactcacacacacaccacactcacacatacatacatcatactcgtacacagagacatacactgtcagcccacatctgccctgccacagggcacggtcactggggtgcgcttacccgacaccacggctggctggagctggtgctagactgtaggaaagcgctgagatgtggggaacccagagctgatttgaggcccctggcctgcgacaagacctgggccacggggttctgctcttggacatccagttaccgctgggagtctcagaagagcggagaatggagttggggtgtgtgtgtgggtggagggggcgtggctgagggctgcatctagcccagggcgggtgtgtgtttggggagaggcaggtagaggggagctcccatttgtcccatcgggtgattgtccttagcttgatggccacaggcttggtggaggttgtggctgggagtgcaggaaggctattaggggaggttaggctgtggctctgtaggtgaaggccttcatggctccccacagcgagacagtccatggttctaaacagtttattgtcatggcagaagatgaacgcgtaaccaatggacgcgtagccataccccacttctcagggtggacctgagattaaatgccttttgcagggaggaatatctgggaaggaaagcttattggcgaagccctctgggcctctaggtatctcattagcatggagaactctattttgagtccacgttaccataggacactgtttttaatgtgagaagcatggcagctgttccaagtcaggagtcttgtcagggagctggaagtcgcctaagcatcaggtttgtgctcaccaagtgtccgggtcttgacctgttctaccttaccaaacttcctggcatggttttacatcccacagtataccatgtgcgtgtgtgtgtgcgcgcgcgcgcgcgtgtgcgcacaccccaacacacacagacaccccccaacactcctcaaaaacaaaatctcaaacttttgataggatcagaatccacagcagctgtccgcagctactgactgcacacctgcctcctttatttcaagtctcttttggcagcatagacagacattaagctgactctccacttcggccgttgtctcagcaatccagtgtttcttacactgaacgtgtgcaaaggggaaacctaggtaactgtcaaaaatgcttagagatcacctgtagaaattatatatatatacacatacacacacacacacacacacatgtgtgtgtgtgtgtgtataatgcgtaaaaaaatatatatatcctgtaacccaaagcagtaggacttgcaaggtcatagcattttacagataaggaggtctttcaatttctacaagaatagtttatattttctgaaggcagatagaatccagagaggagggagcctcaattgagaaaatgtcttgtaggcaagcctgtaggactaatttcttaaaattagtgataaatgtgggagggcccagtctatggtggtgctgtccctgggctggtggccctgtgttctgtaagaaagcaggcagagcaagccatgggagcaagctcgtaagcagcaccctcaatggcctctgcatcagctcctgcctccgggttcctgttctgtacgggttcctgctctgcacgggttcctgctctgcacgggttcctgctctgcacgggttcctgctctgcacgggttcctgctctgcacgggttcctgctctgcacgggttcctgttctgcacgggttcctgctctgcacgggttcctgttctgcacggggtcctgttctgcacggggtcctgctctgcacgggttcctgttctgcacgggttcctgctctgctctgcacgggttcctgctctgcacggggtcctgccctgcacggggtcctgccctgcacggggtcctgccctgcacggggtcctgctctgcacggggtcctgctctgcacgggttcctgctctgcacgggttcctgctctgctctgcacgggttcctgctctgcacggggtcctgctctgcacggggtcctgctctgcacgggttcctgccctcactgcttttgatgatggaactgttagcaaaatgaactcttttctcccccaagttgctttcggttatggagttttatcacggcagtagtaaccctgactaagctagcagatatctaaaataagtgattttgagggctgaggaggacccgtgtctgaaagcctgacatttgccaagattcacttaggcagacctcttggtggtgttcactcattcagcaataatgactttttttttttttttttttttggttcttcgagacagggtttctctgtatagtcctggctgtcctggaactcactctgtagaccaggctggcctcgaactcagaaatctgactgcctctgcctactgagtgctgggattaaaggcgtgcaccaccacgcccggctaataatgactttttgatttccacctacacaccaggagccgaattacatgctggggaacagctgtgtcttagctaggtttgttgttggtttgttgttttgttttgttttgctgtgaagagaaacggagaccctagcaactcccataaaggcaaacatttaattggggctggcttacaatttagaggctcagtccattatcatcatggtgagaagcatggcagcatgcaggcagacgtgctggagaaagagctaagagttctatatcaggatttgcaggcagcaggaagagagagtgacactgggcctggcttgaatttctggaatgtcaaatcccagtgacatacttcctccaaaaaagccacaccttcaataatgccactcttgtgagtctatgggggccattttcatccaaactaacataagcttggagtaggacctgtcctttaacactttggaatttatagactcatgtccaaagtacaatcctgaagttggtgtctcttacttcacaaccctttacaggccagattgtgcctcaaaaggagagagtctgggctgtgagtccactcaactatcaaacttcaaggtcaatgtttctgctaaaatgatccctaatatcagtcgggtctcaagctcagagccacagagaggaggcctgtctgaagggaccatattctgggtccagcagcatctgaatgaacaatcctttccttggatgggacttgttttctcttcactcgatcatcaactttctttagtacttaacaccgggtttaccatcttagagtgatgattctctctgtatattgcctgtgctgtgccccagtccttccaggcctccagggtctgcctaaagggaatcccagagcagacagcaacagaatagtcatccggttagcttaggctgttgtcctatgtgctccacctggcaggaaaaaaaaattgtttttattttaagagtgatttatgagttcttggggggtgtggtggtgcaaacctttaatgcaaacacttgggaggaagaggcagacagatctctaggagttccaagccatcctggcctaaatcaatagttccaggccagccagggatccacagtgagaccctgtctcagacaaagcaaaacaagatttatcagaagtgtaagtgcatttcctaacgtgacaaggaacgatccggtttctgaaaatggatgactccactcatgtccctggtagcacaaaacaagtggggcagctttgcagaaaatacaaaagaataaaagcatgaaaattactaacaattttaccaccaataaatcatcactactaacatttcttccacattttataaatcattcttctttttttttcaaaataaaattcaattctgtatcttactttctcacgtgcaattttctcagcaaatgtgtattatgaatctcttttcctattgttttacgctctatgacatacatttataaaaaataggataatatcttttatttattctttggcctgcaaacagtgcatcttgagcaccgggattccccctcctaactctcccagaacccctcacaccattcccagggatttccccaacgtggccacactcttttatgtcttctttgtttctgttaatagcccactgggcccaccacctgctgcctgttgggactctgcctggccttgtgcaggtaaccacactggcagtgcccgtgacaagtcccaattccagcatgtcacagcactctttgactggtgtctcttagctttctttcagcccctcttctggagctggtcattgttactttgtgggttcttcttttccctaccccagtttcaagcccttacactagataggagaaaaacaaggggagagaggaattaggaaaacccttgaatctaatttcttttgttttttctttgacaaggctactgacaaaacacaactaacctccctaaaggaacactttcactccctgcccccatcccccactgcctctcttggggccctagcatttgtaaaccctctgaaaagcttccggaattccaaacataacacaatcgcaggaatcaatctgcatccggcccaagcatgcttctgctagagcatgaggcaaatcgtgtcagctgcgtgggctgtccaaagctgccccacatccctgcacactcctcaccctctccttcttctttgtaagttgttttctttaaaccttcctccatgggcatggtggtgcacacctttaatctcaacacctaggaggcagaagcaagtagctttctgagttcaaggttaacctgggttacataggaagatcctgtctcaaaaagacaaaacaaaacttcctccagctgtcagatggatttcttcattcattaggcttattctattaggatgcttttccttttgcagtactgggcatcagtctccaggcctggcacgtactcagtgcctatgctaccaccgagccacacctcctgcctgaaagagaaccttttgcctcttgttaatcacaaccacagccacagtaagccacaagtccttcaaccgagagcgctgatctaccaagcctggtggagagagtaattgattttttagggttgtagaatgttagacccatgtgagctcacaaaggcagcatagtgcccagcctcatctccagtgtaaagcaaggcagtgacctgaccaaggtcactgggttcctaaagggctggaaggacaggcagtgccagaaagctgtgtgatagaccaattaactactgtgtcagaagcaaatgcctgggcaaacttctgagctcttgggcaatttgcctaacatcctcaaggctcatttttttctggtctgtggagtgggaccaatacctattgtctaagatttctgagtgtcttagttagggtgttatgctgtgaacagacaccatgaccaaggcaactcttataaaggacaacatttaattgggactggcttacaggttcagaggttcagtccattatcatcaagggaacatggcagtgtccaggcagcagggtactagaggagctgagagctccacctcttgttccaaaggcatttgatcaatagatggcagcgagggagctgctttgctacatatgaaaccctgacccagaagcatgtcctctatgaatggtttagtgccaggttctacctgaacctgctgcattcagcgtgagaggtgagagggaggccccctttgcagcagcaccctgtttctcaggacgaatggctctccacactggaccctggtcctgacacccggtagggagacccaccaggtggggatggacgggaacccgtctatccatgaccaaccgaggctccttcagcgctgtggtattgttccacctgggtgggattctgacttagaggcgttcagtcataatcccacaggtggtagcttcctcccattggctcctcagccaagcacatacaccaaatgcccacgcccacggtgacacacttcctccaacaaggccacacctccaaacagtgccactccctgggccaagtgtattcaaaccaccacactggggttgtactctatggagaaatggtccttcagtaagtgtcacatatgttctcagaactgctgtgtatgtaggccataatgtagacgccttgcctgcagcacaatcctctccgcctgaagcttgtgttgggaaaccccatctctccaggcaaaggttgctcttgatatgggtgatgttctcatggctactaacagaatgaaaggggtgactccccccccaaaggaaactctgctcccttcattaccttttgccactcaccaaccaagtggcatttgtttggaatgtgctgtcagtgctctgagagaggaatgtgaccacagttcagaaaagagcaaggtgggcggggcctggagagatggctcagtggttaagggtatatgcactgctcttccagaggtctagagttcaattcccagcaaccattggccccttacaactgtttgatgctgtcttctggtatgcagatgtacatgcagacaaagtacccatacatataaataaacaaatcttttttgaaaacagcaaggtggaacaccctaagcagtgtgtgtgtgtgtgtctctctctctctgtgtctctgtgtgtgtgtgtgtgtctgtgtgtgtatgtgtgtgtgtgtctgtgtgtgtgtgtgtatgtctgtgtgtgtatgtctgtgtgtgttggcacatatgtgtgcacgtatgtgtgaagaccagagcagaggttggtgccaggtatcttctttgatccctctacttcatttacaagggcagagtctcaacggtgagcctggaactctctgactcacctaatccagtgagccagtttgtgctaggatcctgtctctgcttcttggtcatgatgggattgtggacagaccacacgacacttgcctggcatttttgtgagggtttgggatctgaactctgatacttatgcatcgtgcacacattttatccacagagctatcttcccagcccagcctgagcattttggtggtcatccagagatacacaaggtgagagctatgatggaagaggaggaggagaaaaaggaagaggaggaagaggaagtggacactttgccttttaaaaatcctttggctgatactttccaccccacgattttttttttattattcttacatgcttaacttaaattttttttttggaataaaaaaacccattcaatatttttgtaaaacattggtaacttaaggcctgtggtgatggctaagaagaaaggaatttgagtaacattcttacatgcacataccattaatctcagtaatatatatttaaatatttcaggttggctttagttaattttaaggtcatgtgtgattgccaagttgacccattgagagtcgaagcagcaacccaggcacacctggctcaaggacaagccacacagacacagtctgtatgaagatggagcatgcagatcagagtgagagcccctcaggatcttcctgggaaagagaaaccaaaggccgttggagtaagagtctaccaaagccttttctctttatagggtttgattccttaagaaatgttgattttatttgttgaaagagccacattcaattgaacactagttacccgagctcatctaaaatgcccttcagtggaacactgtgtgagactgtatgaccatagctgtggctggaacttggcgcaggccacatttaaaccatccatcaggccctagtgtcctccctcttccccagggccttactctatagctgaagttgccctgagactccccacatagcccaggctggcccatttctttctgcctctggctcctgaatgatgacatcacagtttgtcgcccacacctggctggcttctaatttcttttctccttctcatcttcttccttaggcttcttctttaaatgaactaagttataagaaagtacagacacaccccctccaaaacaaaacttccaagactgtattttcctgaatgaacatcaaaactcaacaggtaaataaaggatgtggattccttcttttccttgtcttcatttttacttttccccttcagttttataacatatttatttccaaaggaaaaaaccctcaatagtttaaatacgagtccaaaagggttgctgtaggtcagtggcgagccatgatgctgtcttcggcagctcaccgcctcccctaaggcctcttcccatgaggagagagctctatgtctcttcccatctacgttccttaacagcgtgagtctgcactttgttgtgaacgtgttacttttccatttctacatcatgaatttcagtccaaagccagtcccataaccctaataatttctacttgggccaaactgtctgtatctttcataaaatagaaatttattgagagcttctatgggccaatcttgtttcactaatcagcctttgattcccttggatgtcaaaggggacacatactacactgttggtacaaatttttgactctttatggcacttggtaggaatggagactgccatccaagctgggccaggccccggccagcctgggaaccaccttggggcagaggagtcagggctgtggcaggcagcggacctaggcagaaaggacacatgccacccagggaattccttctttcttagtaaggataatgctttgacttaaaaaaaacatcaatttcctgtatctatttaatttgaggggacaaatttacttcacactacatatgcattcaaattgtaggtcctttttaatttttcatactcagtaactggctaagctgtgacccagaccttccaaattagtttaatgtcagtcctggctacaagcatgctccctgtccctaaaagcaaacccggtagacagcctgtatttgtaaaccaggtatcttataagacacacttgagacacatcccatttccccagatgagtcaagtcagcagcagaaaacctcgactcactttataaaaagaagggaggagaaaaggcaccttctctggtgtaaactggtttagtggacaggcagtgggtatggaggagagacagcagccctttcccaggcaggtcccaagagtgtttgggcatggagaaacacttccagatgtgcacacacagatgtggattaaacgtaggataggcagctttagagctaacaggtacagccacagtgtgtcatcagtacaggtccacacctctgacaacacacaggctttctgttggtataccattgttctttctttcttcttcttttccccccaaagccaaacattagccttgtcagatcgtaacagtcttataagcctggtgtggccctcactgctgcaagactgggacaaagagatgatgttacagtctggtttctatggcaacggaggaggggtaatgaaaactgaaatgcaggaaacacccattctgactattgtgacataattcagtttcttacaaggaagtaactatctaagaagcagaagtatcattacctggcggctgctgttcacaaaaagctgtgctgtgtatttctcttagctggtctgtctgtacagaggaaagaaataacacacacacacacacacacacacacacacacacacacacacacacacacacacagagtcctcgctttctgcatgtaaaatgtgtgtgtgttctttagaagccagcggttggctggttttccggacatgatgtggttgaagctgtcatcgtaatggaaattcactgctgtagctatggtaaatcgagtgttctgcctgtactgaatgcattagtctaatgagatgtttgcagcggcggcgagctgggctgctggcgactagctgtgaggcaggcgtagcacacgggtggaagatagcttgtgccatactcgcagtgtgtgtgcaggaagtcacctgtcttctaagccaccactccagacctcagcaagcaacaccctggtcagggctctgtgaccaagctgtaggtaagggagacgcatgctggcgggtgtgctgtggtacattgtatggctccttctctttgggctggcggcacaacaggttacctgctttagtttatttgggagggtttgcatgcctgcctctctggcaatgcacgagtgtctggtgctaaaactactgagcccggtgggtaaacttcggatcctaacatgcaaaatataatgtttgattttttttaactatatatcaaagggagatttaaagtaaaaacacagtttataaccatttttgacatgtatacacttaacctctctttaagtctatatgtaaatatgtgcaaattttttattatttcaaacatgaatatggtttttttcctaataataattttgtcttattttgtattattaatttaaaatttgtagtatggattaggttacaaatatttacctaaaattgattattaaaattggctgtgatataagcactcatcaaagcatttgttttcaaattgaattttatttacttgtgttgaatgctgcagatgggatatttcatgtgtttttgttggttgctgatgtaccagtcatagataaggagagtattaattgtttgcaagttcctgctattagtttttttaggaggaaataactaacaggttagtatggaatgtttggagtttccccaagttcaaagacaaagtcacctcctcccctcacacagtcctatgtgaccccaaatagcttccactcattctgcctgcagccccgggtgtcgtctacaggttgctctgcggatggacaggaccagtgggtatggctgctgagttagcagttttcactcatcattgatgcgcttgagtctaagttcttgccgttattttcgacaataagccagaggtggcggcttgctgtgttgtctttctagggtcatgacatttctcaagagggctaggaccatcagcagctctctgagaaatggggctttgtagctgggatgcttgaaaagtgatccagatgtggttgttgtgtgttccatgtttttaattcctttctcaactaaggaacatttttttttgaagggtaagagacatagatgtctttccctcctcaagacttttttctcattaagaacaaaacaaaacggaatgtctggagaacatgtagaagtatggagatggctgtagaggagaaggtgcctgatttagacagtattttatggaacattttgtgtgcttgttgcttggtagaagtggctcagtcgatctgagtaacagctactgggtggcaattacctagaaaactagcactgcgtagcatcaaaatgcagctaaaatgtaaacattgatgccccgtgcagagaagccgcttggtagctttacagtctacctttaaaatatagctgtcaactactattaaaacatgaatgtgtttctctcactcttaacattgtgactgtgtgtgtgtgtagaaaccttctccaaatctgcctgtctgatttgtgtcataagaggaaacacagatccaacaaaatcccaaatcttagttgttttaccacatttaaatgtcttacccgtgtcaccaaaattacttttatttccttaaaagctatatatgagcaataacgagacaggaagaacgagcgggcaagctcggctttcatctgcacagttcttctgcggctgctgttctctgctagagcaacagtagtttcactttctgcttctcttctcgttgtggggctgaaggttggaggtcataggcgatctaggaaacaagccaaactcaaaggttgtcacctcagctcctccgctttgatcttgccaactgaaaaaaacccaaggacttttaatatattcaatactgcttgcgtgtgataaaaatttgaacaataccctgaaggacaaagacagaagttttaatatttttttgactagatggttggaaaatcatgaccagattgccttaaacctttcataacatagtagtttttatttgtttcttttaatcttaatgttacatctcgaatgcttaactgcaataaatttaaggaaacataacaaggaatgctcactgaagaatagcttttctgttggaaagcggggtgtggaacacaaaattcagagtgtttcttaggtcttatctgcagtttttctggagccaagggcataccacacacacatgtacacaccccttgtgccgcacactttagaacaagcagctacctctgaaagtttcagcacctcatgacctctgggtagctggctcggtgctccttagagatcagaattctagcttcctcctgtttcatattcttagatttgatttgagaatggatttgggatgaggaggaagacagatccctttcccaccagggaagagtaaaatcgttttcctgtttcaggagtgatgttcatgagaacaggtgcctgtcaggtgtgagcacacagacttccttctattgatgggcaaattcagtgtttctgagaaaactttaaaaaaaaaaaaagtttggatattttatgtcttaatcccgaagtctcccaagagactttgagattcacgcgtttctccttttaaaatgtttttgttgctttcagagacaggtgaggagagtcggggggatctaaatggtccctaggatgaggaaaaatcaggtggtttggtacaaatataaagttatagaagccgccagggtgtctagtaaattactctaaattttaattaatgagacacaaaagccatactacaagctttaaaaattaccctttcatcaataaggtgataattaactttctctagaattagccattctccgagccccgggcagtatgccgcctgctaagttcgttggcatactgccaatttttaacaattggtctcttggcaaagctagtgatttttaattcaaatatctattgtggcattttcagttgtggctcaaagaccagtaagatcactcaaatcctggcgaaatctctgagacccagagtagctcggaatatttgggtcgcattagaattagttactttctctttcttcgttttcccgtttcttcctttccctcggcaaaccccagtcttctggctggacgccatggtgatgaattatggtttgcgagcctgtgcacagcccccgggcttcattcatgttgcgcttacctcggtttcagttctagagagccggtgtgtcccctatattcctgcaagcttgcgggtggatcagcagatgcaaagacctaggtggagacttggggagggggtggggggtaggcaggagggacgcaggtcggaaaccttttccgttgcgcccagagggttgcaatttggctgatttacccatagtgatggctactgggtgtaggagtcagccctccacatctcaggggagccgccagcaataccgcacgcacccacgcacgcatgcacgcacatgcatgcgcacgcatatgcacacttttttggtcaggctgggatgttagtgtgtaggtctagacagtcagttcccacggcgacaaaagtaccttcagtcaggtgaaccttttggaatagatcagctccctgcatccacgaggagctcttcagccacagctaaggagacagcactcttcacgttgtggggtggttacagcttgggttaatctgagaagaaaggtatttttcacccaggggcagtcctgagtttgtactaaactaaaaaaaagtcattccacagagtcctggtgtcaccctgaagccaggggaggcagggctctctgttgtttcttctcttctccctggctgctgcagtgtcgcaggaatctggtgctgcagacctacggctacctctcaactctgcagttcctcagccgccatctttcagaaagtttcccttatgaagtacatgagtgagagtgatgttttggccgctacatttatagatgaggtaactggactctgctgcgctgttgtgaggttttgggaatctgtgcattcctactgccagaggcagagaacaaggaccagcctcgctttctgcagaagtcacaacagggaggcatgcaactggctgtaagtgagaacaccaacatgccaggacaagaggcctcagtgtgctctgagaggtggcagtgctggctgcccagacccctgacggtgactcagcttttgagaactgagtatttggtgacaaagccttttccctttctctctccccgtgctgattgttttatggtagagagctcattggttcaaaacagatgcacatggcttgaaagttgtaaagaaattttgtgaagggactgatgcaagtgaggcagagcaaataattatccaaacagggtccaagggaagtgaagagaggggcactatgggtaagtggcaaagggtgctgggaaagatccccagggaaggggtctagaaaatgttcggctggagagaaatggcctatggctctcagccgacagagtataggtaggagggaggcttctctttctccttcctcttttacttacatgccatcccaggacatgatgtctataatgagaaaaccaggattaaacgcacgatgtgtgtttccctactatccagagccacaccctcggtccaccccccagccatgtgtgttctcagaatggctgtatctgacgctctgccatggcactgcccctaagccagcctggggtggcctcaggatttgaatcctgttttgcctggcagccaatgcctctgtgggcaagacaaggaagaaatagagaggagacgcatggtggaagtcagcggcagggattcatgcttttgatttttggaaacgagattagaagtttgtgcaacggaagtatcccttcggacctagctatctctgggctactaccatattggatgcgagacttgttctttgtgtgtttaggtatgtgcaagtgcatacatgcatgtatgtgtttgtgtttcaggcgtctttctcaatagctgtcttgctgtgtgagacagggtctctcatgaacctgggtcttgctgattgtccagactggctggccagtggctcccagaagtctctcttccctagtgctggaattcagggcttatgtcaccatgcctggcttactatgtgtgtgcagggtatccaaacttggttctcaggcttgctcagtcagttcatcgacttggctttcctggaaagaggctgccttcttaaccccactgctccttggacccctctcttcctggttgggaacttgtgtgtgttggtttaatggaagcaaatgaagataaattcccttgagaaaggagagtgaggagttaagggtgggttgtgatgcgtagagagcgtggctgctggtgacagtgatggtgcacacggaaggtccttcccttccttgccttccatctgaggtggaagtcatttgccacaagtccagtaaagggtaaaacaactggacatgctgtgagagccaagtgaggaaaaggtacattcaggaatgtctgcttcaagtgtgtgtgtgtgtgtgtgtgtgtgtgtgtgtgtgtgtgtgtgtgtgtgtatgtgtgtttatatgtgtgtgtgcatctgtgtttatgtgtgtgtgtttgcatgtatgtacctgtgtgtatgtgcatgtgtacctgtgtgtgtatgtgtgtgtgcacctgtgcatgagtgtattgtgaatgtgtatgcatgtgtgtgaatatgtgtgcatgtatatatatgtgtgctcacatgtatgtgagtatgtgtatacctgtgtgtgagtgtgtgtatacctgtgtgtatgtatgtgagtgcatgtatgtgcatgtgagagtgtgtgtgtgtgtgtgtgtgtgtgtggtatatattgtattgtatgccctgcatgttatggctagtgtgggtgttgccaagtgttcatgaaggtacacatactcttatgtgtgtgtgcatgtgtgtatgtgcatgtaagagtgtttgtgggtaagtatgtatacctgtgtgtggtatatattgtgttgtgtgtcttacatgttattgttagtgtgggtgtgtcctcagcagggctccgaatctcttttcaggtcaaatgttaggaatttgaatccttactaacttatttgagaccaggatagtgagaaataaattagaactatgatcatttgaaataaatataactatttctggacacaggtcagatcatttttataaccatatatggcattttcaaggccaaagagaaaagtgtttccatgggatcagagccctggctcatcctggttgatgttagcagggccattgtgcgtttgttatgtggctccctgaacccagggaagcaaatccagggccaatttaggctgaagtttcctaccatctgatacctgctttatgcagccaatcccagggtagagttccctcatttgccctgaacacagacaatggatgggttaagaagcatttgcgtggggaccacaggcccaagtaacccccctttaaggaaaggcagcgtgaggcccagagaccttgttgttgaagctgtgagccctccctcttccttttaattacaaatgcttttaagaccctggttacaagcctgaagtgagggtccttagatagtacaacccactcgcaccacacccgcaagcttaggaaagacagcatgtgggcctcagctgaagcatagagagggatgaaggcagagagatttgtaaagcgtccgaggtgcacaggtactgactccagctcccagtgcagacgataacagctcacactagcagccattgctgctggccacgtgactttctgaaatggtaaaacactcttacaactttggacaaaattaagagcagcctgccttcaggctgggcaccaatgacattcctagaaagtaaatgctctggcaaggtctgggtatggcttgagtgtgcccccaccccccagaggttcctgggctgggagctgggtccccagggtactgcattaagtagtgaggtccagggctggggaaatggcttagaggttaagagtacttcaagaggacctgagttcaagtcccagaactcacatggcagctaacaactgtccgtagctccagttccagggtgttccaaaaccccagacagacacatatgcaggcaatacactaatacatataaataaaaaaaaaaataaaagatgtcccataaaaacaacaacaacaacaacaacaacaaaacaaacaaacaaacaaaccaccgaggcctaggtccagtgattaggccactggaaggactgcccttagaagggactagtgtggttcttgcagggtcacgggtagttcccgagagagaaaattgtaaagataggaatcttggccctctgaatagctctggcttcctgtgtttgcatgccatctcttcctcttgcacacagtcctattgggatgtcagttgccacaggcggtgccgccaaggcagtcttcaccagagggcctgtctgatcagcctaaccattctcatgtcttcaggtttcaaacctgaaagccaaataaacacctcttttctttacaaagtactagcttcaaatactttgctgaggaacagaaaacaggctagatgtatattgtgttcatatgtaagttgaagttattcataggttcagaaaaatgagtttttttttctatacagctggacagtgtcttgtcatgtggcggcgctgccccacctagcataggagatccacttgtcactgctgtcctagtgacagacatgcttgctatgcctccccccttgtgccaagtcaaaccacgaccagcccattgctctctcagtactgctgagccctgtgggcctcgacactcttcactgttgttacttcctccttaaacatctgactgagagcacttgctgctcttgctgaggacttgggttcgcttctcagtgaccacatgggcgctcacatctgcgcaccattccagttccacctgatctggtgccctcctccaacctcctcagaagccaggcgtgcccatgatatacgtagacacacagtcaggcaaaacactaaacatagaaaagaaaacattttaactctttaaaaaaataaagatctcagttgattcaaatggtgatgtctgccagcatccaagaacagctcgggggagccggctttgaggggagggctgcagagaaaatgagaaggaacctatagagcccgcagtatccctggaataacgttaaaaaggcagctcttatgggatgctttctaaaagtggtttcacggaactggaaaaaaaaagagaaggagagtgtgggacctcagtgtgcaggggacgtcaatggtcaagcccagggagtcaacagggcagcaacaggacatccaaaacgagtctcgactctatttgtggtactttacccaacgcttctaccctgcagaatgtcacatagccttagttagattgcaggttcaacttcctttctcctgataagaacctgttccgataccacctgagactcctgaacccttccccatgctaatgaggcatttcgttaccttaagccttcagccaatgaatgacctctgcccacccgggatgttcctatccccagcgcccccccccccaattatataagtcttgaatcaccccaagtaaagttgatctgcctccctgcagctggtcctggtgtgtcttcttcacagggtttcccaacccccatcatggttaacaatcacagagggtggggataaccacagtgagagataacaccgtgtgggtgcctggaactgaacctggatcttctgcaagagcaaaacgtgctgactgctgagccatctctccaggccaccttcttttcttttaaaggcaccagttctattggtttagggccccacccttacgacctcattaacccatacttgattcggtaagagaccggcctccaaatatggtcccactgccagttagggcttcagcacaggaaaggaacacacatcagccatggcagtgcttacctgagtctggcttgtttttatccacatccctgtgaatgccatggtaaccgtgcctcctagtggcctctccactgagcagatgcctacatatcctggacatttaagcttgtcttgttcccgctgtacttgctccagacatgctcggggtccacagaggttccagctctcccctgcagcagaaaaggtggccttcaagtccccaaatctcactccagagctcacacttgccaagtcaggttcaatgtcctacctgttagtggaacatgagatcccttcccagaggtcaggatccatcctaagatgcttaaaattccaattggaggggagtcttgatggtaagaggtccaggtaagtggaaattatgagtcacactttcagaccaggttttctcctctccatttctgttctgctggctagcctcccagtgagattgcctgggtccgagatcctttgaattaaacatctctatgtggcatcactgctggtgccagggtcagaactgaagtcctgcattcccgaatcctatgccaaaacagctgtcagtggtggtcagttaatttgaggacatcttaatttgatggtgaacaaggtggtgtcacttgtgtagcaggcaatgtacggagagctataggaagaagactgagtgtaagtaacgttggttttgggttcttactgatggtgacaatccccaagcccctgactgagcctccaggacagagtcaagtgccaggcagatatctgcctccgacctgaggagacaccctggctaaccaccccttccacaccttccctgggagcattagagagaggccactatattttctggatgcatcaggagatctgcagacatggggagggaggggtcactggaagcagttatgagcctgaagacccccgtggctggcccctccctgagctggagtatcaactgtgctaaaggacattcttgcttacttgttgcatggaaaacctaaccctaaagccattccaacccccttgctccccacctcttcctcccctgctctgtcctcaggaaaactatcatggcctccctcctcaactacctaagataacagttgtggattcccaactttcctcaccccttgacttcaagtctgaaaacaagtccttacggatgctacgtgtaagagagtttcctgcttcctctgtccccacctattccctattgcccttgtgcaggctccatggcaccctcaggagaccacagcttggcacctttacatctgtctccttctttagccagttttgcacactgcactaatgataccatcataagacacaagatctgattatcttagtctgttggcgaatggtaacaaaagaccttaaattggataacatagataacaagaagtttgtttctcacagatctggagttgggcagtctaaggtcagagtgggagtgatgtcagtggaggacaccctctatttccaaggtggtgccatgtttctgggtccttcagacaagacatagcatcatcttgtaagaagggaaagaagaggcagggagtgagtggttcttaaatcttgagtctttatggggtggctaattccattcatgggaagagagccttcgtggtttaattactccccaagggatacacatttcaatatggtggcaatggagatctaatttcaacatgaatttttataaatcatactgtcttggtcactcaacatgtttcccctccacatttatgtgtgtgtgtgtgtgtgtgtgtgtgtgtgtgtgtgtgtgtgtggttatgtatatggaatggttgtgtgtgtatgtgtgtgtttagatatgtataacgaatggttgtgtgtgtgtgtgtgtgtgtgtgttcatgtgtgtaagtctgaggacagccttctggagtcagtttgctcttctcatcatgtgggtctcaggaattgaattcaggtcatcgggtttagcgcaagcttctctactcgctaagccacgtcaccggccaactcacctgctcacaaccccagatcccattacttacacttggttgccaaatacttttctgcgtcttcaactatatcatcacagtatctaagtctactgcttataattacctaattatagatgattcttgggtacatgcatgtgtagtgatgggttgctgtctaccactgtgttaatgcagtcactcattgtggatgttataaagcacatgggacagaacaaatgaagaagagccgctgaacctttgcccaccctcctccctctcccaccctccctcttcctccctcccacaagactgtcaccttccacattgtctttctgtgccctgacattctcttgtgtcacaccttcatgcgatgacattctgtgtaagacacagacagacagacagacagacggacagacaggaggaggatggggagtaatggagacttaattctgactaccatgcacttattaagctgatgcagtttgggacatgatgggtgaataacgttgttgcttatttccccctcggactgtaactagttctcagaagtgctataagtaacagaaaatagcgctgctctctgaatttaagcaggagcaagaacctagtcattttacgggagcaggaatggaggatagccgtagctggagggggcctgtccccatctcgggcagcattgccaaggcctgtgcccaggagagctgtgagcccagactgcacaccaagtttgggagccacaaaggcacggccaagcctctctccttgcccagcccgcagggagagtgcttaacttgctttttagatagtctcgccagtgtctgaattgagctaataaatatgacaacaagaacgaaatgggacaggaaaggctgaggcagcgtttcgctaatctgtgcggagtattagccaaggcatcatgagccctcagcaatgaaatggcgctttggcttcaggcattttaattagaagccctgggaatatccaagctgtggtcctgaaggaaggcctaggccttgtaagtggacccaaggcaaagccttcgtccagaccctgtgtggcagttaaggagtcttgttaggggtagggtttggggaggagagccaagagtgtctgagaggagggggtggggctctgtgggcttgtgtccaacagcaattagccattcagctgtcagcaccccggcccttgttttaacaaatggtagcaaagattgacagaaaagcttcaatccatgatggacacgagggcatttttaaaaaggttcttttctctctttcatcttttaccctgtgatttaaataccacagaaaggataaagacatcatgaaggaaagcggctagcatacctagtccctgaaatttatggggattacgcagagaacgcttaggcacatttcaccaaagaattccccagctctcaaagactcgcttcagattcctcctccttgtcttcagccacttcagcacaggaggatctgagcccatggcaagggggacagcacctctgtcccacaggctcaaggggagggccctgagctctgccacctacagacaccacttgcacaaagagccaagaaccaagggaaacagatggcagcctcctagagtcatggggtcttcaccagcattgggtctcctagcttggagctgggacacagtgcttgacatggtgggattaaagggggatgaaaggtctgtgccaagcctcgatgagagtttggtactcaaagccaacacttctgtgacagctcagggacacaagtgctaacaccggacactgagtcctgaaaggctcaataacagtgggtctcatagactcgcttactctggacatttagagaacagctgtctactagatcaagagctacaaagtgctgccttctgccagtcatatggtgtctcataggcatgctcagacccacagccagtaccctgtttctgtaggttggggtttaactatctcatgtgtgagattttcccaatgatggtacactctgaggacagctacttccttccctcctattgtacataaagtcctagggtaggctgttggtgttgttttttaaagatatatcatatctatcatatcgtatcatcatatcatatcatcatcatatcatatcatctatatctatctgtatatatggtatgtatgtatgtatgtatgtatgtatgtatgtatgtgtgtgcctatataagtttatgtgcatcatgtgtgtgcagtgcccagggaggccaaaacaaagcattggatctactggggctggagttagaggtggtagtgagccactatgtgggttctgggaactgaatctaagtgtgagcacctttaaccactgaaccatctttctagccccagctattggtttctggacagcccaggatgggaattatagccctgccaatgtccaggtagacaagtcgcctctccttgtgtctctgagtcttggtattgtcatgattagaggagagatgataacacccagattagccagtagtcatactgtggcacatgaagtgggcagtttggggtgcattggcaggctgagcccatgctcagtatttcttagaggctgagttccctgtttgactgccctgagttgaaaagagaatctataacatcacgagagagagagagagagagagagagagagagagagagagagagagagagagagaaagagagagagagagaagaagaagaagaagaagannnnnnnnnnnnnnnnnnnnnnnnnnnnnnnnnnnnnnnnnnnnnnnnnnnnnnnnnngagaaggagaaggagaaggaggagaaggagaagaaggagaagaaggagaagaaggagaagaagaagaaggagaaagagaaagagagaaagaaagagaaagagaaaaagaaaaagaaaaagagaaaaagaaaaaccacagggaagactgtaggttcaggacactctctggtatcacctcccatgataggccctgttttatttaatgagacaagaaggggcctatccttaggcagtcctcagatgcttacattcaaacccagttggagaactcatagccagtcttctcagtgtcaccttggaccttgggttctctgactcctctcgtcccagtttccccccagagagaagtcagacttcaatgctgttgtccctatggtcacagggaagacactgcttcagggccaagctggtttctcatcagctcaggttgccagggttgtagctgccctgtgctactcaatccgagggcctataaaacagttcctcacatatgtgaaacttgacatcaccctctgctgagctgagctgagctggaaaacttagagcttaggatacagttgatagtgcagctttggatgggtctgagcacagcccgttttcagatgtacttgatgcctttcatctaacagaaacattagggctcacacgatccactaggattcgagttccagagagctgcactgagggatcctgaggtgatgctctgcttctgtcagaagggcaacagcatgctttcgtcatcttcatctttctcagagttcatgagaacaagcatgtggcccttataccacacactccatggtcttgctagttgtcaccctacagattatccaaatggtcactactgcctctggcccagttcccgctctctgtctattcccgttgttcttctcagggacatgctacagcgtggaaaagggagagacctcagggtgcaggccaagtgcccaggttatcatttacagtggtgtgggtcctgggaaactcacacagggccaagtctctcctgagggtgttacaaaaacctaacgaggtgatcaatgactgtgccagggcctggcatgaggcaagcccattcaacaggctgttgactttctcttctgcatgctgtttagtgttgggactctgtctttgagactcaggtggtgggagacaagggctggttattgtttgtttggtttttgtttgttttgttttttaaatactcgatttagttactcccttcctccttgtctcttctttgttaatctggtagaaatcaaggtggcatactggtcatgtagaattgacaagctcacttactcatccacccactcaatataagccccttccgctttagctctgtgcttatccttatggatacaaaggtgggaaggacatgactttatctacgagacacttctagtctaattatggtgctgagcaggaaggctggcaagtcacgggtgagtcccgtgcatggcaaggcaggctatgcagggcaccatgcaagagggagactgagatcatgcctaggatatgcccctgaacctttggaaggacccctttgcatatgccagggcagagaagtggagagagatatgaggctgcagcagcctatgcaggggagtcctgcagggagggaagctgtggagctgccttcagctgggcctcaccgggatccttttctaaaggcagaattctgctctaccgaaggggaaatgggctctctgcaaatctacaatacagagctaggtcagggagaggagtgggaagcgaggctcagcagaggattgggaagaattcagtcacttgtgcccagcaatggagaaggtcctgccttctaagaggaacccttgagggtgtgggtcttgaacaaaaggaaaccagaaaggaggaacttaactcccgagtctcctgccacccccaactcccacactcagatggctccgcttggctgtgttgtccagctccatggtcagcttttactctaagctagtgtgaaccagagaggtgcatgcaggccttcaacgcagatagggatcatattctgttggctctaatctgtcttgggggccctagttttaaaatgcttttcttaagagattaaaaaaaaaaaaaaaaaggattgtccaggtaatatcttgtgttagaagaaactgcaagagctaagtcaatttaggaaattcacagaggtatgcatgggtgctcatgtatgcacatatataattttagataacttagaataaacaataaacagcctttctgtaacttgcaatactgtggtttttatctagcactttctctctatactcccctttggacactgcattggacaaggcagaattcaaactgaaaagcagagttctggagcctgtcttgacctggggtctagcctcaggcaactgtggccattctgtctccacttaactcaaggattgtatcaccatgcctcctctgaattggttaacattatatttcttagttatccaagctgaacaccatagctttgtttatatttaaatgaaaatgagtgtatcagtataggctctagttaatcccaaagatgagaaagagaggagaaagaccattggctaaattaattgaaacaaacaattaattaaagcaagcttttaaattcatggatatgaactgacccccctaaggtgggtttcaagaggtcagcattgggtgtgaggaagacaaggtttttatagcccaggggtagggcgtttccaaacgggaggaaagaggtgaggctacagaaacaaacataatcataacaagtccgtcatagtgacctcctgggagaaaaacactgttgcaaagtgggcacaacaaagtgatcataacaacaagtagtcatagtaacctttcaaacgaagatagtgttgtaagatgattataaacaacttcttttcaacaaaagcatggctgctgttttctggacagtacaggtgggacacagcccaatccttgagaaacagcggcttaaagaaaacagacagacaaaccaacctggttagtctttacaggactggtcagatgagcgtagatggtttttgagcctaagatggaggcaggctggttctttactatgtagctgtacagtcagagcgaaccttttaaaacatggcaagggctgtagtgtggctgtcgtaacacttagaaaacacacacagggagagagagagagagagagagagagagagagagagagagagagagagagagagagagagagagagagagagcgctccagttgtatctctgctctactcagaaatgcccagtggctcttcatccagctcaaaaagaaaagtgttttcagtgacccaagaatagcaatacgaggtccccattgtctcctctacctcactcccaaccgtgttccttcattttgtatctggcttgttagttttgacacaccaagtccacagctgccccagggattttacctgttgttctgtttctctaggatgtcgtcttcaccacagtccttaggactttaagtgtcttggagtttgcttgcgcatcctttagagagaccctccctcccagccctccctgcatcaggctttactgccacttttaagctgacctttatggcatctctcatcatggctggatctatgtctgttttaatggtttgcgtctttccactgagagataagttccatgagaccagtaacactggttatcatttatactatatccttggtacccagaacactgccagggagtgagcacttgttttttttttttttttttttagattagcatttgctgaagaaatgggtggatagctgagtgaatctatgtggcaggaagactctcttgcccagcactctcacgtgctaatccctactgtcttagggttttactgctgtgaacagacaccatgaccaaggcaactcagataaggatcagagtgctgcccatagccctggactacctattgcctgaccctacttgcctttgtgggttggaggtgcagtggctcagaaccaacagcacagactcccagagcaggtgagaaacactgcagcaagctcatctgaccagtcctgtaagctcctttaacatcctccccattggtcccaagaaagcatctcttctaaatagcagttcctgattggctggcattgtctgtggcagcaatccttggtctctcaggcagtcctcaattagatcctcctgcaggagatgcctttgtggctcagaggtggccatgccatttctcctacatcagagttcagtccattatcattaaggcaggagcatggcagtgtccaggcaggcatggtgcaggaggagctgagagttctacatcttgttctgaaggcaaataggagaagactggcttccaagcagctaggatgagggtcctaaaggccatacccacagtgatgcatttcttccaacaaggccacacctctaaataatgccactccttgggccaagcatattcaaaccacagctctacagacagtgtgctgttttagaaatgttcgcctgtgagcaagtgtagcaacaggtaccctgcctccaggtagatgtagaatcacaggcgtgacctctgtccctgggaagcaacaggaaacatctgggaaattgaacatcatatttatcaatgggaaaagtggtagaaaccttatcgactgcattccagaaaaaaacaaaaaacagctcttctaccatgtaaggaagagctatgtaggagtcagttttcaccctgggactcagataaatatggtggggatggggtgggaggtggggggtgggatagaggaggtttcagctggttagagaaatgcatgctgagctccctggaaagacagcttgagtgtgcttagccgtttgaggagatgagaaatggaccatacgagttgggactagggtgtctagagaccacacaaggaatgacagatggtccttctccagatagaagattctaaaaggagattaatctggttctcatgagaggttgcagggaggggccagagtctgtaagaccctggcaggcttcctgtgcagcctccagccagtctggatggagagaggggagctggataggagagtaggggggcagggacaggatggcgatcagatggtgcggggagagggctgggagtgagaatggaagtcagtggggacatctgcagcactagctagaggcctgagctggaggctacaaggactctacggggtaacctcagctgagattcctaccggagggagattgagagactgaagtgcccacttcctgcagcccggcaggatttccagagggacggacggggacatcaatccactcacaaaaccttcaatccaaactttgctttgcctacaggatgtgctgggacaaagatggagcagagactgagggaatggccaaccaatggactgcccccatttgagacccagcccatgtgaaagagccaacccctgacactgttaatgatactctgctatgcttgcagccaggagcctagcatgactgtctcctgagggcttcatccagcagtggatggagacagatgcagagagacccactgccaaacagcagagcccgggagacttgtggaagagtggggggtggaagtgagcaactcagaggggtcggcacaccacgagaagacttaaacagtcaactaacctgggactgtgggggctcacagagcctgggccaccaaccagggagcttgtaggagctggacctagatcccctagacatttgtagcaaatgtgcggcttggtcttcatgtgacttccctaataagtggagcgaaccatgtctcgttctctgttgcctgccattggatcctttcccctacctggactgcctgtttgggcctcagtgggagagggtgtgcctagtcctgctgggactggacgccccagggtggggtgtacccaagggggctcctctgaggagaaggggagggagcaatggagatttgtactgttgggactggaaggagagaagggaggctgtgatcgggtgtaaagtgaatacaaaaatttaaaaattaaataaatttttaaaagggcgtctgtatgggtgctctgtaggactcccctcataacacagccctcattctggtgcacagacttcctcgttatcttattgaagtacgctggagatacccctcccccattgctctatagacgattttcattgctctgcttgatcaatttggagagtataattttattcatctattcaaacaacttcagctttattgatatgtgtctcttgctgggattttactccatagatttttttttgttcttaatttgatggatcgctcttttccaatcagtatgaatctcatttgaactaatttttctggttttgtacagtggaaacctaaataagtgttttaggtcttttttcttccaggttttttaaagagggtcttgctctagagtccagcctggccttgagtttatgtgcggctcctttgtctcagacctccaggttcagacccaccaacctttcctcccttcttttcttcttccatgtgtcctttatttttgtttttttgtttttgttttttaagacagagtctcacatagccaaggctgatctcaaacttactaagtagcttaaactctggatcctcttgcttccacctgtgaaaggctgggaataaggtatgtgccactgcatacaataatttattttctgatacaagtgtttacgagcagaagcttatctatacgcactgtgctgaacacataaaatgccatatggttgggggcttgttctcatggtccataaacacagattattctctaattgtgctggtgatttcttctttaaaccaaaggatggatggatggatggatggatggatagatagatagatagatagatagatagatagatagatagagatatatttccagatatgtgaatttttaaattatgtgtaattttatgttataatttatatgttgttatttatatatttttattttatttattatatttatattttaagtagattttcgtattttatattttatatttatatttaatttatattttaagcagatttttaaaattcaaatatctgaaaattttctaatctgctagttattgacttttacatattctataggagtcagacctttgaaatgtgttgggatttattgaaatttattgagatttgttttggggctggtcttgatgagtactccatgtatttaaaaagactatattggacatgggagacatgcctataagtccaagtctcaggaggctgggcaggggaatcatgagtttgaggcctgagaggctgcacggggaggatttgtctaaaatagcaatgaatcaatgcatcagataaataaataagcaggatgtctgctctgtgggtccagagcaaatgctcatttacacaggcccatgggctgctcagaccatcaatctccttgcctattttttcagacctggtccagcagctacggaaagcacagtgtcaaaatctgcagctaaaactgcagacttgctccttgtcccttggttctgctacctttagatgcatgtgttttgtacctaattcagcgatgcataagatactttgtgtccccttgaaagttcaactcatcattgtaagtgtnnnnnnnnnnnnnnnnnnnnnnnnnnnnnnnnnnnnnnnnnnnnnnnnnnnnnnnnnnnnnnnnnnnnnnnnnnnnnnnnnnnnnnnnnnnnnnnnnnnnnnnnnnnnnnnnnnnnnnnnnnnnnnnnnnnnnnnnnnnnnnnnnnnnnnnnnnnnnnnnnnnnnnnnnnnnnnnnnnnnnnnnnnnnnnnnnnnnnnnnnnnnnnnnnnnnnnnnnnnnnnnnnnnnnnnnnnnnnnnnnnnnnnnnnnnnnnnnnnnnnnnnnnnnnnnnnnnnnnnnnnnnnnnnnnnnnnnnnnnnnnnnnnnnnnnnnnnnnnnnnnnnnnnnnnnnnnnnnnnnnnnnnnnnnnnnnnnnnnnnnnnnnnnnnnnnnnnnnnnnnnnnnnnnnnnnnnnnnnnnnnnnnnnnnnnnnnnnnnnnnnnnnnnnnnnnnnnnnnnnnnnnnnnnnnnnnnnnnnnnnnnnnnnnnnnnnnnnnnnnnnnnnnnnnnnnnnnnnnnnnnnnnnnnnnnnnnnnnnnnnnnnnnnnnnnnnnnnnnnnnnnnnnnnnnnnnnnnnnnnnnnnnnnnnnnnnnnnnnnnnnnnnnnnnnnnnnnnnnnnnnnnnnnnnnnnnnnnnnnnnnnnnnnnnnnnnnnnnnnnnnnnnnnnnnnnnnnnnnnnnnnnnnnnnnnnnnnnnnnnnnnnnnnnnnnnnnnnnnnnnnnnnnnnnnnnnnnnnnnnnnnnnnnnnnnnnnnnnnnnnnnnnnnnnnnnnnnnnnnnnnnnnnnnnnnnnnnnnnnnnnnnnnnnnnnnnnnnnnnnnnnnnnnnnnnnnnnnnnnnnnnnnnnnnnnnnnnnnnnnnnnnnnnnnnnnnnnnnnnnnnnnnnnnnnnnnnnnnnnnnnnnnnnnnnnnnnnnnnnnnnnnnnnnnnnnnnnnnnnnnnnnnnnnnnnnnnnnnnnnnnnnnnnnnnnnnnnnnnnnnnnnnnnnnnnnnnnngcctgcatgccctggcacacaaacaaaggtcagaggagaacctgtgtgacagtcctcttctctcatggtttagacgctctctctgttgttcttcccctgcggacaccagcctagctggcctgccagtgacagggggttctgcctgcacctccccttcttcaatatgagcgctgaggttacagatggtgccccacacaaactgagctgagccaggctggaccgcagcgctatttaaatcccatgtacctgtcacttgcttatctctcaaccagcttaatcgatttttttagatttatctttgaattcaactcacacagaactcgagagtccaacaactgggaagctgtcagtactgtataatttgtcttaactacttggtcccttttcagtggtgctttatcacaaaattttttttaaaaagacttatctattttattaatatgagtacctgtcactgtcttcagacacaccaaaagaaggctttggaccccattagagatagttgtgagccaccttgtggttgctgggaattgaactcaggacccttggaagaacagtcagtgctcctaaccattgagccatctctccagtccaaccccagggttgttgagagtgttagaccagtgctccacaactgagctacaagctctaccctggaacttgaggccttttcaatacacaattgtttcgtgcattcttaatatttacaaattgattgcttctcaaaggaaaaaatctatttcgctctcctgattagttttattgttttattcttattagtgcattgtgcatgtgtgttgggagagtacatgtatgcatatgcacatacatgtgtgtgaaggtcagaggacaaccctagggtgtcgctctttcattggtctgaacttcatcaaataatttaggcgcctggccaggggtgtcagatgcctgctcagctctgccttcctcatgcaggagcagggtttgaattttggtcctcaagtttgtaatggaaacatctggctgaaatgtctctctagacctttttaattttaattaagtgttttagtctcagaccctcctgagttctggaattacgagtatctgccactactcacccctctgccccattttgatgtctgtcctgtgacagagactgctggagaggaggaagggaccttcttcactggactgttttcccacaaggcggcaagtgggtcctggagagggggtggttcaccatcagatctctagtgctctccccagacaaagggctctgttatttctggtttctctgagtttctgagtttatcgctgcttactttctttctactctcaggaaaaccaccttgctctgcagccactaccttatagtgttttatattaaatatttcttatccaaaatcctgctgtggttgggtctcctggcagcaccccgcctcacccagcccccggcttcacagttctttatcttttggggacaaaacccatgccctgtgttggcatacttccgacggcaggaagagttagcaagaagtagaactacagaagccaaaaatcaaggttagttcatttaggacattttcctggagcctgggactatggaccaagtttgttgttgttgtttgtttgcttattcatttgtctttttttttttaattgattctttgtgagttttacatcacacacccagtctcactcatcttcccatcccttgtatctgccttctgtccttgcaacctctctccacaaaaatatactaaaaaacaaaattaaaacaaataaacaaaccaaaacaaagcacagcaaacattctcttgtggaagctcaagctttggatctgcaggcccagccctttcacgaactccagtaatttatagatgaggtagatgttggatgggacctgggaggtagctagatcgatcagtcggcctgccagctctcccgcacctgcaccacgaggcaagctctcgggcactgcttagtgagctcacccaatgctgcgtccagcaaagagcagagcctgttctcctgctctgcagctcaccggagcctctgacaccaggatcgactgcactgtgctgtccaggggaagcgtggggcccactctcccaagtgttgcacccagcgagcgactgggccagttctgaacagcccttggacatttacaaggtcccagggacgtctgtacgaacttcagtgatagtacgagctacagacatcaatacagatccccgatcctgcatagccacggacccagacatggccctcagtggcgacatggactgggacttcaccatggccacagatggcagacatgccactcacaacaggccactgctctccttcctcgagtctccagttccgtcactcttcataacgctcaaacttctctttccctgtctactacataatttttcactgtagtggttcactctgtgggtaggccacaggctggccgacctctgggtatcttctgacacccatgtagcatggcgtgacaatgggtgtgggaccaagtgtttgttggattaggaatttgtttctgttttggcaggtgttggggcctttatgctggttttaaggtcagaacggtgcctgtaacatgcaatcagttgtgccaaggtctggggtcctattccagtagaagagtggcaagttccaggactgtctgggctacatagtgaggctgtctcaaacgaccaagaactgggctcagcggcagagcattgcctggcatgcacaagacctgggttccatctgagcacaaaacagaagagataaaatactaaagtttcccctaggagcaggagcaagcacaaatgtcctctctcagttacctcagcaatgtcctggaattttcagtcactctagcaagacaagataggtgtggagagaagaaaaggaaaaaataaaaaaataagaaaagacaaaagatcagaaagaaatgcaagtttgtcatggatctgtgtgtggtgtatgtttgtgtatatgtatgtctctgtatatgttggaagggggtataagagcgtgtgcacatgcatgagtgtgtgtgcacatgtgcgtgtgcatgtgcgtgtgaatgtgtatgtgtgttgtgcatgtatgtatactctgtatacattggggggtatataaattgtgtgtgtgtgtgtgtgtgtgtgtgtgtgtgtgtgtgtgtgtgtgtgcgtgcgtgcgtgcacatgtgcctgtagcggccagaggctgctaacaggcatctttccctgttactgcccacaagggtttttgaagcagggtctctttctgaccctggagctcagtgatttaacctgtacacaaagagaagccaccggagtctcctctctgcctcctgaaaactggagtttcagctatgccttgttgtaccccattttgaaaggtagtatttgttttattttacatgtatgagagtgccccctgcatatatgtatttatagtacatatgtgcctggtgtccccaaaagtcaaacagtgacgtcaatccccagtaactggagttaggcatggttgtgagccagcaggtagatgctggggaactgagcccaggtcccctgtggaagccaaaagcgctcttgtaatgtttgagctctctttccatcccctgcatttaagtttttaaaacatgggtgcagaggacacaaactcaggtcctctgcttgtgtggtgaacaataaatggattgagccatcaccccagctctagaaatatacttttaaaaaagaaataccaccttggggcctaggagcggctcagtgtctgcttttcttacactgaatctggttcccagcaccccatggttactcacaaccctctgccacatcagttccaggagtgctgacaccctcttctggtctccacaggcatcaggcatgcatacagtacacataaatacacaaagcaaaacacatgaaataaatataaatattttaaaaattaaagaaaaagaaatacaattttaaatccacagatgacatgattgtgcatatagaaaaatccaaaggaatgtttaaaacatggccccaaacatggtcaaacgattagtttgctagtggaattgagtggctgtatcaagaatcagttatggaggaagaatctctattgggccttgagggacgacgagctcatgttaggcagatgcctctccttcagcgtgggcagtggagaccccagcaagctgcaggacacagtgtcctcccctgccttcatgcagacctgctgggagaagcacaggaagaaatccacaattaatttctttagtttctcaaagaaatgccccagtgtgacacgtagtgacaaagctgacatgtcagggaggtgaagggttaagttcctcacaaaggtgaaaagaaaggaaagaaaaaaaaagactttaatgttcctaaatgacttcttcctgctttgctctgagcagcaagcacccaaagatcaaaagtgaacgcccaggcctgtgtgggggaaagaacgcatagacgctgggtgaaatggggtctgagcagtcgtcagccaagggtaaacaactgaataagccactaaactacaggagaatagaagggcgtggctgccgactgtgtcagggtgggaagcagcaaagaaggggcctgctaggtcagccagctagaagaagaatgaaccagaaaagatgaggaggaggaagaaggggagaaaaagaggaggaggaagaagaagaggagagggagggggaggaggaggaggaggaggaagaaatggctgtcctataatgtgtgtgttgctaaaaactcaagtgcagctcaacattagcttcagcataaaaagtatacagttttgcatagctgatgagactctttgtagagaaaaaaaaatttttttaaaatgcagtttggagtttttgaggggctacaacgtacagttagatttaaagcttttgatgttgagtgttcttaaatatctgatgatcagtttcttacatacagtaattcggcaaacttcctaagaattcatattaccagtaaaatttatgtatttatttatatattgtttattaaaattacaataaaataatgtatattgaaaaaattcaattgcatgtctgtgtaaaagacagtttctgggagttagcatttacttactcccatccacagaagtatcaaaaccagaatatacttgatgaggcatgccactgaaaacggtagcactagctcatggacaaaccacagagccccaaggaagccgaaaccagcaatacatgtaagaactgtaaatcacatattgtgaaattttcagtccattttaaattactcatagatttgaagcatccccaataaaaattcggtaggtttttttttttaatttgggtgaaattttcaaaataattttgtgatgctgatggaacacagggccgtgggcatgccaacactgtcagaaactagttctgaaaagggaacacagagctgagagtgcagcctgtctcgtttcaagacttactacgagtcgtggtaacctagagacttgggtgtcagtacaaggatacagagctatgtcgacagaataaaatcaagagtctgaaaacagctggcatggtgtctcatacctgtaaccccagcgctactctggaatacccagtgagtatcgcgtcatccatggcccaacacatctcaataaaaccaaacaaataacaaccaaaacaaatcaacaaaccagagtccagaaatagactccagttcatgggcctggcagactttgagagaggagccgcagaacatcaacaggaaggggaaggtagccttttgaactgctctgggtgactcacagccacacagtcattaactgaagatggggtaagcagcagcctgcaagaggtgagacaaggcagcaggtggaagaaagcagactggtcatgcttggagtatgataggtttcttagatgcagaagccaatgaccagaaaaaaacatctaacacatctgtttgataaaagacactatttagaggctggtgtggtgtggggcacagtgagagcgtgcttgtctagcatgtacagaccttaggtccagtcctcagcactgaataaaaaggcacataaataagacagacaagatactatttggaaagtgaatagtaagccaaagagggtagtgaagttttaatatatatatattaaacatacatatacatatatatatatgtgtgtgtatgtatatatatgtatgtatgtgtgtatatatatgtatatatatatgtatgtgtatatatatatatgtatgtatgtgtatatatatatgtgtgtgtttgaacaaaagacatgtttaagactatataaagaattcttatagcttaacagtaacaatagaagcaatggaaatatgtgcaaaaatctagaacaggcactttaaacagaaggtatatgaatgacaacctatacataaaaagacacccaacgtctccatgcatgaaggaaaagaggatcgctttgcacccgctggaatggctaccttgagagcccagcagctccccagcagaggctgcggaaccattgctctgttactctaacattgctgggaaggatcaaggctgttcacacacaaagttcaatggaaacctaagccatggcccagcaattcagtcccatcgtcagcccaaagaagagcaaacggacatcagatacaagatccacacatgcgtgttgctggcagaattttaaaagcagcttaaaattgcaaacagccctaataaacagccaggtggatgatgggcaggttgtccttccatcctgctgtggggtgcagtgcaaaggaccatgggattgaaatgcctgctctcccagctgagaagccagatgcaagggtgtgaatcattaaatccctataagtgtaggtcgaatagtctagtaggtagataatcattgccaccgaagcaatagtgatcactgggggaaggcacaataaacctaatgagatgatatagataatgttttgaggttcaggaggttaaactcgaggtcctggtccatgccagggaaatgctctaccactgggttctatgttctcagtcccacagccagttattttgcgtggtgaatgggttacactggtatatgcttttgctaaaaactcaaatgtatctttaaaatctgtgagcttgaatgtatgaaaaattatccctcaataatccaattatctgtttagggaaaaaatcttaaaaagggataaaagtagttccctaaatttgtgaaaaattaggtggccttacatggtagcattaatctatagaactttgtgttggattagcacctggtgtggtggccttatctttgtaatctgcatagggatgaagagcagttagaagggtcaggggttcacgggcagcctcggtgacagaagatctgtctggaaaagaagatgaaataagaaagcactgcacattgagttaattagtggagaccatacctgctaaactatagttagtagtcttgcatggaatgattaatataaactatttgtgtgaggttgagcagtgcccctctcaaaagttatagccacacagacctccaggcttcaaacatattagaaatacagtttttcaaatgtaattagctagctaagatgagatgacattgagattggtggccataagttcaatggctagtatcctactatgactgtggagatggagaaagagaagaagtcttggagcaatggaggaagaaactggactgatgcagctactcatcaaatcatgccaggactggtggcaatcatgagagccaggaaaagggcagagtggatgtcaggccctcggccaggtcccaagactaaatcagcagagtggatttcagcccctctgccaagactaaaaccagtgcagctgctgccttgacctcagactttggcctctggtgtgaggacccactttagctgttgcaagctatcgagtgtggggtaattaatgaggtctgtgttaggacactagttcacgggtcaatctgctatcagaggatacttaagaattccagcatctgtctgatactcgcaactagacttgaatcaatacattaatgggctactctaaaattagacattatatttaggtgtaccatataaatcaatgcatctccaaatatatatccctcttttatgcggtttgaatagtatgaaaatgagttaacagcacatagccattggctacctgtactgtcattttctaatggatttataaatcctagagaccctgccctgtcagcaactggggaagcctgaatggtcccggtggactgctttgggacagggagattgttgtctcaggaaatcaccatgtcccaggatatggattgatggtcatttattttgccagtctggttcgattcgactaaggtttattaaatacctcatcctgagactccccactgaaatctactcggttcaatccaatcaaacccgtgccatcagcgtcccttctttgaaagtcactctgcagtgagcccctcgcttagtcaggtcttcaagcactgcctctggcccttgggcctcaccacaaagatactttttgaaaatctattatgagatgtaacgagagaccagtaacaagacctcagtaagagagattgatggctgggatgggacaataattctgttttcctacactgcccttctcattttaataggcgtcaatatccttaggaaattgagctccttggagttagggattcgcctccaggtgtccttcctccttcctctcctgccaagaagtaacagacatttacttctgcttgctgttgaaatacaggacattgattcccccttagctgcttttgaatgactgggccatggataatgagaatccagagttgttatttgtttaataagtgctttttattttaaatatgttttgaaagattttactgtatagcctagatcagcttggaactcttgatcatcctgcttcagtgcctggaatgtaggtggcacaatgcgcaactttgatttaaatgtgtgtgtgtgtgtgtgtgtgtgtgtgtgtgtgtgtgtgtgtgtgtgtgtgtgtgttgtgtgtgtgttgaaatgtcattgtatttctcaggccagagatatagcagagttgctagtggttgtctctcaggcctgacgtcccaggttccatttctagcaccacataaccaagaacggtggtgcctgcctcttgggttgtgggaggcaggtggatcagaagttccaggacattttcttctacatagcaagtctgagaccagcctgggttacatgagacctgtctcagataatttctctttgttgttttgattcaagagtgaaattttgtttgtgtaaagaaatatctagtttttggactgcttgtttaaataactttaaaatttaagatcatcaatataaatactctgtctttgtgtctctgtctatctctgtctttgtgtctctgtctctctatctctgtctttgtgtctctgcctctgtgtctctgtgtctctgcatctctgtctctatctctgtctgtctctctccccttgcccttcagcagactggattgcttctattttttgcttccttctctttctctaaattcttaatgcggtgtgatgaggttggctctcgggactgttgtgatacattgttggtagtattatggatccaccccatgttgccacacagaataatttccctcctggctagacgtccttacttttgaccattacacaatggaaagctctatatgccttgcccttcactcccattagagtcaatatttatttttaatgctgcctgggacaccagctgttctgcggacaatggcagtattgtttcttttagctggactctggtcttagttccagaggctcctccatcaaatggcctaggtcatagtcagaactagtttttgttttttgtttttcaactaaaactcttaaatctttttagaaaagatttatttatttgtatttatgtctctgggtgtattggctgtatgtatgtcggtataccccatgcatgcctgttatctacagaggccagaagagggtgtcaggtgggctgggactgaagttatggttggttgtgaacccccatggggggactggggattgaccaaacctaggtactcttgaagagcaacaaatgatcaagaagacccctgagccatctctccggccccactacatcttcttcacactggaagtctctcctgtcttggctctgttggacatcttgggacggtagggtatctttgagtttccctcagttaattttgtctccacatataaaacatttttgaatcccagctctgtgatctgtagcactggacacctctcccaagctcattatttggcacgtctgccttccaaaccttcatccctgttcccagaagctgacaactaaaccagaaaccagaagcttgtggctagaggcaacctgtagagctgtgatgtcacccaaattgggtgtggctcattagtcgtgaactctaccctactgcatcttcctcctgctcatatgctacttaatatctgtctcggaaacttctgagacagcttgtcaaatgctgggcagctgtcaacagtctggggttaattcatgcttccgacctccatgtaactaccctgttctttctctcaagtaaatcttaattggttaacccttaaactagaagggggttagtccttctggagccagtgacacattataaacaaaggcatcatcttctagcagtgtttgtcatggatctgttggtagttctgaaacgattaattgtcacacacagagtccagtttgctttgaagttgggagaaaatgtgctttcctttttcttctcctgatttcccagaaaactccccagacctattcacagactcttgctgtaccccagagctcattttgtctgaggctagcaaaatctgacttcacaagtccctgagctgtgatgactgtctccacctggacctaggacccttcatactgtctcacctcttgtcccctcatgtctggtccccactcttgtctcctcatgtccagtccccattcttgtcccctcatgtccagtccccactattgtctccttgtgtccggtctccactcttgtcccatcatgtccggtccccactattgtcccctagtgtccggtccccactattgtcccctcatgtctggtcccaactcttgtcccctcgtgtccagtccccactcttgtcccctcgtgtctggtttccactcttgtcccctcgtgtccggtccctacctcttgcttcccatcccgtcctgtgtcctgctgcttctcgtctgtttcttactagacagaaacaagacagctcctgagtagttccagtgccgtctggttggctaatttcccaggctcctgaaggagcaggctaagtccatctttgtttctggcttctggcaccttttgctcttccaggctgtctttccagctcttactggaaggacagagtctcttccttaaacaaccatgtgggtgtatctttctgtctgcaggaaggcttgcccagttgcctcacacaacctcagagtgccccacgaatgcctaagtgtccagtgaatattcatatagatatgggctttcagaaagcaaactcatgaagaacagactcagttgaggctaccctgagacctttgagagaggagacctgcactactcccaagccctgcttgtcgactccaccaccctgggaagcacactggacaaaggagtcattgtcttgtcctctattgacctttcctttggcaactaagaatggaagcctgcagctgtgtcatgctctgccaccccctcacccccaccgctgtcagtgttggttaaggacctgctcacagcctgacctggagaagtcacatcattttcatccagctcagacatggcacgtgaggtggtggcagttatatcctccagttgtcttaagctgagtttgatggtcccagaacaggagccttcttagctctgctgtaaacgtttgacaggcttgctccgtatgctaggggcttctcatagtgctggcctcagagtctcaccgtgagaactgaatggagaaagattagcatgtgtgtgttcatcctctctctgttgccttgttggtgctgtggactcagtcctgtatgtgactgttcaccaaggacagtccccacgccatgaaggtcatggtcaagggccgggggagtagatagcctatcaacagcagggcgctctgagggaaggagccactcccacagagtctgtggcaggcgtagtcctcactcatactgtcattttggctactggccactatccagtgtgtcctgaggtcacgcagggtctgtttctcttcaggtgacctgtgggtgtgatccagactcaccatcacagagagaagctgtgctagtgatggggtggtcaagcagtgggctgtgctgggtttgcacacccaaatatgtcagtaggactcactggacatgtaggggtgctctgccttcctcaggggacccctgagggtctccgtgttgtaattataaaaagataaataaatataagaatttgttctgtgggggtgtagtgaggtgtggaggaaggggatgcctcagcgggcccatgccaaggcatccccttccccctgagggaccagccacacgacagtatagtatagaatagagtttattcagggcatggggaggggagttaagagagtagtagaggcagagaaaggcagagaggagagtagaggctggccatggccacatggagagagaggggggaggggaatggggagagggggaacaagggggaaaggagcaagggagagaagcaggaataagacagagaggaggggggcaagcagccccttttatagtgggccaggcctacctgtctgttgccaggtaactgtggggatggagtccagacagaataccaacactctgggtacatcttcatctctttagtgctctgcacagtgggtgacacataggtggtcaggagtgtggtaggatggttcaaaggatacacagacaaaggcaatagtgtttctggccagcacatcccctttgaaggctaagagtttgcctttgaccttgcgtgatcttgtaatacctgtcagggtggttttgggggacagtaggttgtgaccaaggagagagtgaccctcccgacctgtgcccctactcgggatgagggcaattgtcccctgatcctgacagcccagaagcctttgtgaccgttggtggtcagaagtgaattcagcacactttgctctccttcctgtgagatgggggattctgtggcatgtgtcactccggccccctcactttatgtattcccttctcagcccccacatgcctgatgtttgaagagtctgggttcctggagaagtaccaggggacagtgaaccagtgagtgctggcttcacatgcccagacaaggcttatgccttgctggccactcagcacccgcctttcttcccagcctcatggctttctagactgccgagcccctctcttcccatgcaagggtttcagtagctttacttctatggcgctggtgctatatggacaggcagagctgagtatcacaccactgtctgggtgtattcttcttggagaataaatgaaatatactcttgcccgctagccatcttttgggggtgctacaaagtgatcaggaaatatacttccttctactctgttctttacaaaaagaaaagaacgttgtgttggggggtgggggaagagcagtaattcatatctcatgggacctacttatcatgccgggctcccttgggatcctagtggtatactggtagcacagacctgacaaatcctgatgtatttgattgccagctcaggacaatgctcactagcctctttgtcactctacttaccacctatcaaaggcagcgcctgtgattgttgcatgtttctaactactggggaagataaatccaactaccaagcacagagaatcaaagtcaacttcaaaataactgtgcacttgctgttgcctttgctgctaatgttgctgttgcctttgctgctaatgttgctgttgtctacacaatgttggctacgaatgttggctttcctgattgctggggaggcagcagtactggttgagatcccacactgttcttgctgtttacccctgactgctatatgcagctcatgctggctggaggtggtaggtcttccagagcaaacactgagttgctacatctcattctatagttctaaagaagtgcctgagatacctcggtattcttcaaagactgtcttgtgaagacatccgagttacacatctggactttagagtaaacagtagtgtgcccaaaattctgtgaaatgtgggcattgtgaaggtggttatttcagagagatttgtccttatcctagctggctctcctattgctgtgataaacaccaggaccagatgcaacttagagaggaaagtggttatttggttacacttctatatcgtactccatcactgagaggagtcagggcaggaactcaggtaggaacctagaggcaggaactgaaccagaggccatggagggaatgttgcttactggcttgcttctcctagcttgctaagcctgttctctgatacaacccagggccatctgcccagggatggaatcaagaaaatggtccagagacatggccacaggccaatctgttggaagcaattccatcgtaatgaatgaggttatgaggttccctcttcccgggtgtgtcaagttggcaaccaacgttagctagcactgtccttgagatagccacatactctggagactgttgaatatatcccagatttggagagttatgactggtactatttgaattttgtcattttatcagggaaatctttactattcttcctaggaaagtatttgaaaagaaacttgctctgttctctctctctctctctctctctctctctctctctctctctctctctctctctctcccctctctcaccttgaaaagaaagctttctttgtagatcttgaacgggaaacaacccaaagcaaccaaaccacaagcactttctctaaattaaacataaagtataaacagagaacaaaacaggaagtggtggctggctgaaaacaagaactcccacagctgtcctggaaagtgcggttccctgccctgccctacagaacacaggttcagagatgcagtgagcctagagtcccctggcagacaagtgtcttctactggcacttgctgcaattgctcttcagcaacccctcacagtatctgcatcagctccagctaccgcaggcgttaagtcacaggggcgtcctgtgaatcattgggttttcttccaccctttcagctttcagagatggaagaagtggccagaggagtcaggatcccttcttgtgccccacctgcaatgttgccactctgacaggttccctccaaggctgaccgggtgtgtgtaccaagctctggggttaatctgaactctctcatcagtaagcactgatggtggtggactcatggtatctatctaggcatcggagcctctcttctaagtccgagggcaatgatgcttgcctcagaaccatgtagaaactaacagagatgaagcaggtaaactgtggcaggcctactttggaaacttgtagtgacatgtcttgctggggtagttttcttgtttggaaatggcttttttaaaaaattgtgcatgaatgtatatgtacatgagtgtgtgtgcacgccatgggtatgtgtgcatgcaatgaggatgtgtttggaggtcagagaacaactttgtgaagttggttctctccttccatctttttataggttctgggggtataggtaactcaggctgtcgggattgtgttgtgagtgtttttacacattaagtcaaacgtagctggcccaagaccatgattattgaagacccctcaggtggagtcctgagcacagggtcactactaacactaataaacgaatggccagtctggagccagagtcctcagtgctggtcagtggaagagtcctggatgaggggcagcccagcagaccactcattcaattacttggtgaacgtttgttagatctctgagatgttcaaatctctggagttggagccagatgagcacacctgtaataccagcacccagaagacagtggcagaaagatcatagcaaattcaaagccatcctggtctagatagcaaatgctaggttagtcagggatacatggcaagaccctgtctcaaaagtccaaatcaattaaacccggacacagagctgcaaccatgggctttcccacctgcaccccagttcctgtaataacaactctgaaacttaattctatgtgaataaaagcctaggccataagctcgggcttgtaactcagttatcacgttaaatctagtctgaggctgtcgtaaggctagctactctcctaagtttcatgcatctgtctcctcagagttcagggcgaatctcttcctgcgcctgactctatcctagaattccgctctccctcccagaactctcacctcctgtttcttgtctcagctcatcggccaatcagctttttatcaacaggtgatgcttccatacagcacacaagagatggtctttacccaggcctcaactgtatcaagagagatagacatgattgcgcatttcgttatgagaaagagcatttagttacagcccagagaaggaattggaaataaaaaatttcagctggactagcaacttgcagtcagagctatgggaaaagaggtaaaccccctaccaccatcaccccaccctcctaaaacacctccctgaagtggctccttttcatccagccaagggtaaaatgaagactcttgtgtcaggaggacacttgttgtggtaataattaattaggagttctgccaggtagaagacacaacacttttatatttatatgtagcattagagccgggcagataaccctctatgctattttgcccatttccctgtcaataactccaagataggacttgccatgctctgcctgggccactcttactctgactggccagccctgttggctaattcttatgatcccctaatccatggcatcttctctcttcactgtcgcctctctctcccctcatggtctctgcttcagaccacaagcccgggaacttaagccccgccgacttctcttctacccacctacaggttagaggcatctttattgaccaatcaggagtaacttggggcaggggacaaggttacatatcatcacttggcatacatgagaatctccttttccccgggggcaagcagatctcgggaggtcagtctttggcaagacaatatgtggcaacagaccaaacctcaacagacatgattcctgttggagagtaggggactgatatctgttgtgtaaagttgagcaaaggttaattaatattctttgacaaaactgtgagggagcctcaggggacaggctcagaggcccactgtggctcagttctaaccttgggccctttctgcctttggttcagtggtgagcaggtcatggaagcctctgattgaggtaaaagtagggggatgtgggagtccagggatgcagactcgggcttccagctttcatatgctacagggttaggggtgtaaggagacaaaactgtggacatccaggaagggcaatcaggagaggagcaggctgtgagccaggagtgctgcaggctgtgactgtcctggactcttcagtctcatctttgaggtccagtagtctcagagatgttctgctatgtagtacaagagtgtatcttctcccttctgagtgttcaccctctgaaggcagggcacaggctccagcaaggtactccagtgacctcgaatgtctccactagaccacgtagatgaggcttggctgtggctaacccactgtaagaaaactttgtgatactctcccaacctccctcctctcagcttaaggctgcaggcttgtgaggaattgctccaatatcgtaagtttcccccgggactgttactacacacctgctgcatgtagaggtcttctgccttgtcctgttttaggtcatagctaaggctgcagagtagttcagctgtatcatacatactaagtcattgtggcccctttgttttattaatcccaagaattgcctgataaaccaactccactattttgagccaaataaggagagggaagtctctctccatcccttggaccctggtttccctccttatcccagcaagagacagtagctaccgttgtgagagcacttccagagacatttcatgcatctgttagtctacacagtaacccctcccctctaccccatccacaagggacatccaggacccccagcaaatgcctgaaccttcagatggtactatttttacaatgtttttttttcttatatacatacctatgacaaagctgaatttatagattcatcatggtaagagagcaacaaagctgggcagtggtggcgcacacctttaatcccagcactcgggaggcagaggcaggcggatttctgagtttgaggccatccctgtctacagagtgagttccaggacagccagggctacacagagaaaccctgtctcaaaaaacaaaacaaaaacaaaacaaaacaaaacaaaaagagcaacaaaaataactaacaataaaagatgacatagtatatactgtaagaaaggtgactgtgatctttctctgaaagtaccttagtctctcattgtcttatagtgatattttcagactatgggtaactaatttccctcaaagcaaaagcataggcaagcaggaagtgagtgtgcagggatgtgtgcacatttattcatacacctttcctgcccaccgtctgggagcacactaccgtgcaactatgcaaatttcaacatttatccctcccttttcttacccacaagtctgaggagcacagatcagatcgcctccctgtcaggtcccctatcaagacccataagcttgctcatgggcacatctccagctaaggcaagagagaggcacactcgagcctttgagacagcagagcctttgaaagagcatcccaaaggagccttccttccaaggttccactggccctcgttgtcaagggcctgctgtcactccacagacatcttcagggaaatctcttttgtatttaagacaatgatcatttaatggggtggtatggccttttgatggaaaagtcaaaatagaagctgggtcttcagctacagtccatgctgcaagcacttcttggtgcaagagagaggatctgtcactcggaccctgaagccagacaggaggaagtttcaggtatggagctagcaaagcagagaggggccttcttcgtctcctggctccctcatcccatgcccaccttccaagcttaggcagttccctcccagatagcacacttggacagcatcccagtgcctcagggaccaggagggtggcttaggaaggcagctcccttcagtaaggaatgtgatagagagcatcaggttcaggctattacgcaagatctgcaatgtgttgtcttttgtgcggatgtcgcttgaagtgtaagacactgtggtattgctattaaaagaagtgagcacctgtgatggtttgtatatccttggaccagggagtggcaccatctgaaggtgtggccttgttggaataggtgtgacctggttggaatgggtgtgtcactgtgggtgtgggtataagatcctcaccttagttggctggaagtcagtcttccactagcagcctttggatgaagacatagaactctcagctcctcctgcgccatgcctgcctggatactgccatgttcacaccttgatgaaatggactgaacctctgaacctgtaagccagccctagttaaatgttgtttttataagacttgccttggtcatggtgtctgttcagagcagtaaaaccctaactaagacagcacccaacaccaggaggaggcaaggctagccactcatggccttacacacccagcttctcttacctcagactcatcttctgagaagcaagtctagaccaatggactctgagggcaaagctagctatcaggatgttcctgggctggccaaggtgactgaagaagagttaggatacagctgagcactgcccacccagtaaattcttagtacctgtgtggcaatctgtctcccatgtttctaactactctggtgtttcaaaatcctgcagggtgtaaggtcctactgcaaacatttgcccttcttgtgttatgaaggcttccctccttcctctgatgccaatgacctttggctctctatccctctggcggcgctaccattcattgctggggtaggagaggtcatcaggaaggagagtaggtgcagtcaaaggtagctgagtttgcttgcttctgcagttctccctccccagcacatggctcagcataaggacccggaggatctgccacccagcctccctgacatcattgtgaggatgctatttctgtgggcaaggaggcaccaaggtccctggtcatctagaagtttcatgtcccatggactcaagcacaagtctgcactccccagttcctctaaagctgttgaaagttgcatcatgttcaactgttgagccctttctccctggttatgttgtggggaccagcactgaccaggttccttctgctctgggttcaattcctgtttttccagaatgcactggcatcttcacaacatattacattgatcttctctatgtagattctagagacaaggacatagcagaacttaagggaacgaaaagctataaacaagttctctcacattaatgaggccaactaaaacaaatttttttttcctgtttacttttcaattatatttaaaaaattacaattagagctgggcttaacttctctaagacttccatgtgttgaaaagaatatggctgcacacataacacatcctggttgctatgttactactgtcactgggagacacacgtcattacatcgttctccttaccctttagaaaccctcttcacacctttaactccactcttgccctacactcaccagagagtcaagctaatcctgacccttctttgtcctgcaaaatatgaaatcagctgtctcaaagagctcttggttttatttatgggataaatattttatttatcccataaataaaatatggagaacaatatcacagagtaaaattttaatgctaggaatgaatatatgtattgattttggcttcagttagctaaatgttgtcagaactgggaaaagcatgtattaaaaagaactcattttctcaatttaacagattctgttattgtctttagtccttatttttaataaagcatttattctatttttaactctgtgcatgtgtgtgactgtgtgcacatgaaaggagtatgtgttctgaactgctgagctatctttccagtccttattgggcccattcttgtcatatttagttttgtttttgcaaaatatcaaatccagggtgttatatagtctatacaaacattctttcactgagctacatcttcagcccagtgtgtatagtgtgtatatcttcaaggtgctcttttacacggaacacacatctatccaaattgatatgcttttgcccacactctaaacacatggatacaatgttgccacctcacaggtgtcaggtgcactctgcaggtgcaaaactgagccagaagctgaaggtcagagtaagtggtacaacatgggctctggcctccaggaatgtacattacttacttatgtgcatgaagcaataaggaactgtgagagccatcattaatcagtacttgagaatattactagccagacaatgtgggaggatgtagttgagagtccagtatagagaagaaaatctctctgaagcttgagctcgttggcgatcattgagcgtggctgaattcagacaggtgccaaaggaaacctttatcattagaaatcacctcatgtatagtcccaaagcccgagagctattagggccttaggtgcctgaaggttgcacataaatgactctgggtcacagtgaattcagcatggagccgcagagcaagatgaaatagaattactgtagaccattacactgggggcaggagcccattccctgtattaacagaagagtccaggagagacttgagagcctgcacctgctgcctttggtactttgataaacaatagaaagctatggatagttctccttgtctaatttatccacctttccttcatatacccctctaatatccctgcccaacctagcagcctgggtacttctgcctggaaagtcctaaatctgatgtcatgttctgattctcctgtttctacccctcccagttatcccagatggaagaactgatttcttccatctctgatactctagcatttcattttattattttgttacattatatgtgtgtgtgtgtttacagatacatatatataatcttatattgtcttaatattattacattgcttttattgcctgcttttctatagatggtgattatcatagaatctttctgtcccctcttctagaatgttcacccaggtcttgaaggggctgagataaacacctcatttaggactgaatactcaatcgtctctaattctcagcagttgaccaattacaagactctgcactagccattacccactgcacaaggaggcttctttgaccaaagctaagggtgaaaagccatttacagtcttgtgagtcccagctgtggatcctgcttgctacactatagccttctagttaagatatgcccaaagcaatagtggtgtgactgttaaatggcaaccaattattttctgattggctccaaggcctgttccacaggggcaatatgtgtctgctactgtaaaactggctgaaagcctatggcttagtggatcacaagccctactgggaaacccactactagtgtttgctaaatgaatacatatcgtcaaattgtcttctgagtaatgtttacatcaaatggactagtgctgatctcagccttgtcaaagcaacttctttttactgctttttttctggaatattaaagcagtgatcggtgctgttcagtctctcgggttgtaacatcatcagcaatcaaagaaaatggaagactatttaaaaaagagtaaagatatctaaaacagctcccagagaatgagactcattcataaattgtttatttttctctctgtatatttgtctctgatttagaatctcaaaccatgcaaaatggcacacaaaacagagtaaaaaccacatttcagtttcttttgcccaaggatgaccacccataatcttttgaggttttcctttctcagacccacactagtttataaagcactgtagattcttacatgaagccattcaaacactgtaagaagtaccccacatatgctctcttacacacacacacgtactcatgcatgcttaaaatcagtaagtattccactttatgagtttgaaataatacattaaatcaaggctgttttgaggggtgtttaatagttcaccattataaatatttttgtaaagaatgaccttgaccacatatttttgggttttctttagatttttttcttaataatttttaagtaaattattttcattagaatttgttcattctacttttttcttccttcctttttctttttctttttttttttatgtttttggtttgtttctttgagatagggcttcactatggctctctggctgtcctggaacttactatgtagaccaggttagccctgaactcatagagatttgcctgcctttgctcccaaatgctgggattagaggcatgcatcactacatctggctatacttattttttctgaagacacagagggactcttccttctgtatgacagtctttaattacttatttcaatatttgccttttctattaccactgaaccgtatttaagcatgatagaattttatggtatcgaaggacacatgctccactatgttcatagcagccttatttataatagccagaagctggaaagaacctagatgcccctcaacagaggaatggatacagaaaatgtggtacatctacacaatggagtactactcagctattaaaaagaatgaatttatgaaattcctagccaaatggatggacctggagggcatcatcctgagtgaggtaacacattcacaaggaactcacacaatatgtactcactgataagtggatattagcccaaaacctaggatacccaagatataagatacaatttcctaaacacatgaaactcaagaaaaatgaagactgaagtgtggacactatgcccctccttagaagtgggaacaaaacaaccatggaaggagttacagagacaaagtttggagctgagatgaaaggatggaccatgtagagactgccatatccagggatccaccccataatcagcatccaaacgctgacaccattgcaagattttatcgaaaggacccagatgtagctgtctcttgtgagactatgccggggcctagcaaacacagaagtggatgctcacagtcagctaatggatggatcatagggctcccaatggaggagctagagaaagtacctaaggagctaaagggatctgcaaccctataggtggaacaacattatgaactaaccagtaccccggagctcttgactctagctgcatatgtatcaaaagatggcctagtcggccatcactggaaagagaggcccattggacacgcaaactttatatgccccagtacaggggaacgccagggccaaaaagggggagtgggtgggtaggggagtgggggtgggtgggtatgggggacttttggtataacattggaaatgtaaatgagctaaatacctaataaaaaatggaaaaaaaaagaattttatggtatcttacatagttcaatgtgtcttgagctcagtgatccccaaagctgagacacttccttacttccttatcatcatcatcatcatcattactattattaattctttttgttttctatccatagcatagttttgggaaggaagattttggaaacctgcattccccctcccccatttccaaagtatctggacctgttattgaaggtaaattgctttacttgtgattctccaaactctaaaattatcctacagacatttagaggatcccttatggttctgataaattcatttattatccaactaagtatccttgttacttagcattaaatttgcccactgaagtgaagatttccggtttctttggagactcagttgtatcatgtaaagtgttttctggaaactgtctcatgggaggatgttttgctgagaacagacacgtggtggttttctggaagctgcctgggagaagggcatgtgatgctctgctagagtgagtgcttggaaagatataaatataacccaatagacagtggacaatgatgacaacgacgctgtgtggtattggttcaccctgccactctttcctggtcatcatttgtcatgatgtcagagagagaaaatgccaccaaagaacttctgatatgttctggcaacttcttgccacttcctcagatgcaggccgattggcagagtctcatggtttcttctggattgaactgttgttgctgattcatgagtggcttttgtgagtggatcaggctgccactgctgttggattggtgtgagctgatctgctgatatcctgacatcgcagattggatttgctccaaagagtaatttctaaacaggcccacatccttctctgctctactaacctttcctttccactacctctgctgggaggtgggctagaagggaggttaggaaccgttattaaaagtccgtttcgaaaaatataagtattgatatatataatataaatataaatataaatataaatattgattagtaggtaaaatgagcaattgctagggcgtggtaggctgggaaagcttgggtatttcctgcctctggctttatctccatcccagtagttcctaccactccactgacaatggctccctactggtcaattagcataaattatataacagacaggctctcacactgtctaagactggtgcttctgtggaaggcaggaagtaggaggcagcatgaggcatggggatttcctcattaagaaaaaggaggtaaaaagtcaggggaaaggaaatgggttaaacagatagttcttcttcttcttcttcttcttcttcttcttcttcttcttcttcttcttcttcttcttcttcttcttcttcttcctcctcctcctcttccttctcctcctccttctcccccttcttcttcttcttcctcctcctcctcttcctccccttcttcttcttggaaggactttattatatggaacaacttaaggaaagttaattttacttgttggatatcaaagtaaacctctttttaggtttacttatatttgaaacttcattgctaactcatattgttctaaacttgattttcttagaaattgttgcattttatttattatgtgtgtgcacacacagggacagaatacatgcatataggtgagtgtaaagggtagcaattatctcctatgttggtgtccaccttagttttgagacaaggtctatcagtgggacctggggctcactgattaggctggcaggccagtacaccaacccaatagatgtacctgttcctgcctccccggtgctagcatcacaagcacagctactatgcctgccttttttatattgtgctgagtttggcaccagagcctcaccttgcaagatgagcagtgtatcagctgggctttctgctcagcccctaaccctaagctttctcttgcttccgttttgacactgatgcgattagatacattgttaatctccacactaaaggcaaagtaagacaggcatgagcaaaccttgtattcccagctttctggagactggagcagaaggaacataataagctagagggtgtcttggactgcgtagcaggatcttgtgtcttgaaaccaaaaataaacaaagcaaaataaaatttaaagataaaggcaaagtagaaagatgcagaaatacaccctacaataagaaaaccttctgtttctaaaatcttaagctcataacaaagaagcagaaattcgatcacgatagatcaaaatgagactgactttcacccaacaagacctttgtgatttttattgatctgtttgtgcttttgacttcttttgcaccagtgaatgtttggggtatttgttggtgttgagacccagaaatagatttttgtgttatgaattcctacacagtaatcataatttattgactctaagatgtatttgattacagaatgtgtcgttatcttatgctctactaagcagtctcatctgctggaagtgataaggggcatctatattccaataaggttaataagttttttttaaaaaatgcatcttagattcagtgagatgggattttttttcaacacttagaaaaacagaaaattgatatttttagcaggcttcttttcatgtaaattatcttatttttattttatttgtaactatgtgtaatatatgtgcctgtctgaggatttaagtttgtgagtacagtgcctgcagaagccagaagaggcctagggagttacagacatttgtgaactgcctaaggtaggcattgggtcctctgaaagagcacccactactcttaaccatagagccaactctctatgcctagcttttctctttatctgaaattaaaactctacttatagagttgtgaaataaaaaatattcctcctttaaaattgtatttatggagttggaagtgtggctcactggtgaggtgcttgcttagcacacacaaggccataggttcaatcctccacgttattaacaaaaaagaaaaagaaagaaacctatccaccaaatatggtttatccaaaaataaatcttcctctactgtgttttaaaagaatttctagtgttttgctttttcttccctgagtaaagctatgtagtctctgcttccctgcccccaaccctgggattcccttctatctaatacctgctgctgtctgcttccggccccctctgggcctctggccaaggaaacggggagtgtccctaataacactaacacctgctgcaggcttctcagaagcctcttatttcaatgggaaggttcttgcaggtttctctactctgcagaagtggattgcatcgcctaacaccgtccctgagttaaagctctgccccacttgacacattcctgctggatatctgacctctgagcgtccacttcccctgttctctgggtcatggctttgttagtggcctcttgcttccagatttatggaattctacctgagcagcttatgattaacattgtcggagctatgcttaggtcacagtcgcgtgcaggggggctgtgtacaaaggactgtgtgttgtgaacgttgcccacagcctggccatctttagtgaccttttagcaagctttcctccatttattttagcatataacatattgcatagttgggatcattttcatgtgtcatttgagtgcatgatacttcttttgtctagcatcgtgttatgcaaaatgtgttgctaaaggctttaacttatttgccagttttagtttgttgatgtattagctgttcccttatgcattgttatttgggctgtatctattttatttctgcaattctaaaataatggcaaagtgaacaattttctgtgtgcaaactcctgtccatgttcggattgaaggatgtcatggtttttttttttttggtttttcgagacagggtttctctgtgtagccctggctgtcctgaaactcactttgtagaccaagctggcctcgaactcagaaatccgcctgcctctgcctcccaagtgctgggattaaaggcgtgcgccaccacgcccggctggatgtcatggttttaatgaaattgacttgtgttactaaaaagggtgatgacagttcataattcaatcaaagaaacaagagtaaatatggaggaacggatgaatttgtgtaatatattattaatatatgaatgttacttagtaacataattataattgctatttaaatatatgattacacattaatatagtatgataatatattgtttactatgagattatatttctatattgttaatataatatagtttatttagcattaaacattataaatatagaaaatcgtgcatagtatttagatacgattgtgatactattttattagtccaaaactgaattgagacatgaaagcatccagtcactggtgatgacctcaggtgtgtctagatccaggaatctattgtcttctccacctagcagtactgcagtctagttgtacctgactcacttacatagaccccgtcttcctcctgtaagtggtaggtgtgcacaaatcactatcagatctatgtgctctgaaaccaggcgtacatttccaattttgtttttctttctatctgaactaattcccaggacctctcttgcctgcgtgtggtttgccttctcacgcagtaagactggcaccagcagagatgcagacacagagggtgccagggaggaaacgtggccggcctccacttcactccacacgggtgcagatggccgtccataacctctattctgcttctgctgcctctgtgccagcagtgacaatcccaaagaagagaggacggaagcccaggtacaaggtacgcctcaccatccccttatcccgcatcatgttgggctggggcgctggggctcgggcacagctctgctgcagaatgccatggaagacaggggcctgggaaaacaggctgagaaacacatctctcaatagagaatgtgatggcaaggtctcataggggcaacgaggcaacaaggcacacacagcacactgttgtgtgcttttttttttttaaacaaatggagaaaacaaatcacagcagatggggaagctgtacgttgagcagattttagggctgttgctaaacacatattattaagcttgcatctaaatgagagtgtcgagggctgagctgtcccctgactatgatcagcagggtggctcttgaagctactagaatttatctgtggtgattttttgtttttgattttgttttgtggaaacagttgatattcctgacacatttaaagtaatgtcataagtaggccagggtcaaaagatgcaatgaagcttcctggacagagatttagcacaggactcctggggtttggattatagttttctgcttataaaagatgctgatgtccaatttggctgccaagaggcagatgcatagccaccagagtcctgagagcatcataaggactaacaatatggagggagaggctatggtgggaaacagatctgatgatgtaactccaatcctacaaccccacccaagcccaggggccagccgccgtctgtgacactttatgaagggctggctaagtgagggaaagctagaagcttgttctccgccagcctctgggctctagaagaagagcatcagtagttgtctcccacgtagttttcatgaaatgaaactggtgtctccatcttgagacctgaattctgcaaccaaaatgcaaattggcaattaactctcaagtattaggaaaatgtatggaaattatttcaggtcagcagaaagagcttgtgaagatcagataatgaattcaacctttatccttctccttctttgcaatcctttcaaatgcaaaaacacagtcgtggggaaaaggttgttggttattcaaatttactttagttttcttaacttttttttggagacgtcatttatttttattttattgtatgaatgtttgctagaatgtgtgtagatatgtgtgcaatgcctgaggagaccagaagagggcgtgggatcccctaggagagaagttacagatggttgtgaaccaccacgattgatcttggatcctctgcaaaagcaaccagtgctcttaatggctcaaccatcttcccagccccttatttaatttctcaaaaagtgtgtgtgtgtgtgtgtgtgtgtgtgtgtgtgtgtgtgtgtgtgtatggttgtgagccacctcatgtgagagctggaaagagaatttgggtcctttgggaaagcagtatgtgctatgaactgctgaacctgtctttagcacacagtatttttttttttttaaaaaagctcttcttcatcaactcttctatcaggtcatttttctgacagggaaacctctgtcaggaaagctcacggcaatatgtctttaggattgtgcgtctggtctcagaaagctagcctgggtacttgtgcctgctcagccgcctacctgtgccattgctggggtctggggattgtgtttgggggtgggggggtggggcagaacaggctttgtgtttcatagacccaaggagcaagttcaagttccaagaaaacatagtaaaacttctctggccttcttcctggtcccctggggtctgtgacccaagaatgaaaattaccaacagacacagtatttcttgagccaagacaaataaatggcagctcacccacacggaacaaacctgacttactttgcaagtttcctacctccttaaagggtttttttttttcagtgtccctaacactcagggacacctctcagtgtccctgatatccaggacacctcagagcagagcacagctaaggttcgctggctaacacacagaccctgcacaaagctagcaattctgtttccacctctcggtgaatttctttcgtgggaacaagaggccacctctggttttgagcctacttcctgaatagctaggaagatgcatggacattatctcagaccacgcccccgcagacaactcggtaggtcttaagccttgtgtcctagaagaacagttcctgtctgtgtgaccctgtcacccatcaatgatgacaaaggaaaaataaggaccatgtgaaagtctttgtaaagctaaaatgatttcctcaaaagattaccctttattctaaaatacatgctggtgaaaggaagtttttgaagctctggtaatttaaaatgctctcagttggcaaaaacaaagttgctaacagaacctcctcggttttactttggcgacaccccattttaccattaatgacaggactctaattgtagaaatgcgagcaagtaaattgtacagtctcactccatttaccaagtggccactaatttggcaattttgattatctgggacacagtcagggaggcaggagttggtttggttttgctttgttttaaactgactcagcacagtaagatcttgcttggtctggccttaatgatcgtgcattttattactaagaaaatgcttcttgggcgtggatacagaggggcgggcttatattcctagctgtctggaggcagaaggattcttggagtctgagagtttgagataagtttggaatcaacagtaggaccctgtctcagatagatagatagatagatagatagatagatagatagatagatagatagatagataaaattggagtagggagtggatggggaagggctccatgaggaggggagggggagaagagaaagcaatctggggcaagcaggatccaaatgcattagacatgtatgaaattgcttaagaataaataaaaattatttgtcaaagaaaggaagctcttctgtgccctttacattcactgtaaccagtctttgcaagctcagttctggtagtgtctacccttagagacaaaaaggaagggatttgcaggcggaaacacggaaaaggtagcaataacttgatacaatctgataatatattaacacaacgaacacaatgtaacaatattacaatatctccccaagtgcctctgttggtcccctctgttcctgcataggtagccgctctctgagaacctcacttgctcctggccttgagcctagttgacagttggatgtctgagtgtttctgagactgatgttaacacgggtcgactgtagaaaaggaaggatcaagctggaggacagatgtcagtcccttggagttcacagcccctgacccatcctggaccatctggctgagtctcttatggtatagagcctgctgccatattactggggtctactcaccactgagccttgctgtccattgtcaccttgggaaaggacacagataatctctgaacccatagtttctagaaagagctgtactctgtcatgtgacagcatttttcgtttcaaacggaatatttacctcttagcatctcagttgggtcctcagctcagaaaccctagcaagggcagcaggcaaagtcccttatattccatgactaggaaacaccttgatctttgtaagcaaacccttctgtcctgtagatgcactgactttactatcttcaagtagtgggaccaccatcctgtttgtcagggctatgaactaaaagccaatttgaaaacaaacaaacaacaacagcattatatttctttgtgtgtcatccaccacataacggccatattgtgacacgcttggaagttgaatcagcattttgaagtcttttctcttcatgtccttaagtctgtaaaccaatacaagaaacccggtcagaacttgtaacatttgcaaaggtgcaggtgacactctctccatcctgtcccctctgactgagccaccaacaaatgaaccggaacatggggcagacaaagtgaacccatttgagagtgatggattttaaggacttgttactttttaaatatacttaattcaaccgtaaatctatgtacttcaagctttaaacagcagctatgcttaatttctatcttagttttcaccgctatgacaagacacagtgaccacagcaactcttatgagggaaaacatttaactggggctggcttacagtttcaaaggtttagaccattatcatcatggtggctggaatgcaggcagacgtggtactgcagaggtagctcagagttctacatccagaaccacaggcagagcaagagagggagagactgggcctgtaccacagctatcaacttacaggcatttccgaagactgtatagtctcttcctgtggactaatatgagccagttcttatgctcttctttctgtggaagtggctaatttttgctgtgagtttcataggatgccatacagctgtaatctgtctagtgcttgctccacatagtagactggatgtgggaggggtcacagaggtaaggtagcaaccccactgagccgcatcagaagcacccacctacctactgtcagtcccgctgctgctgttgattttgatcctgtgactgaggtggcttttgtcgagtgtcccactgtaaatggcactgccccatttctacactgcagtatttagaaggaattcattatgcacatccttaaagaccagggctctgagctcaccttctagggaagatgtggatgctctgctcatgcaagatttatttgtttcccttgcttatttacactgccagacatttacttacagcggcaggacttgtggacatttattatgtacacacttagtgctatgataagttactacactacctctctgttgctcagagtggtccagatctgtgagctggaagttctttcagccagcaccttgctccttaagatatgccaattgttggttgattttgttattgtatttccagcttattctgtaacaccccccccccatcttagtcttgggaccatctgttttggatagaagtccctactccttttcttgaagaatgacatgagaaaccaacctaggagcattttgttttatttattcgcgaaaacaaccaatataacaaattaatgttaaaaatgcaaatcaagagtatcgaaaacaaacggcctgcaagagaagagcatgtgctggttggaatggatgcccacatccatcagaccacggacaaggtgctcatatctgtgtcccactgtttctaggcttttctaaactcacggtgactccctcttaaatgttagttgtgcatgcagactggctgttgcactcagccctcatccctgcaaagcaagcacgttgctgcctgagctctctccagcaggctatttttagttctttatattagacagtgaaacttacatttctagacactaagtaaattttgatcatatttcattctcctagaaaagaaatcccaaattttaaagggcatagactccttatgtgagtctagttttgattgctgtaataaaaggtggcagctgcatataattcataaaggaatgagcttttggtctcgggatatagctcagtggtagaacatttgtctagtgggcatgatgccctgatttccattcctaatgtgtatatgagcagagagagagagagagagagagagagagagacctggaagtacaggaacatggtggctatggcttcctgtgaggcctcctggtagaagatatcccaggagtctgtgcagatgtggtaaggagccatgagtaaaacagaggctggggtggaggcagtcatactttctttgtttttgtttgttgttgttttgaaacagggtctctctatgtagccctacctggtactggattaaaaatgcacgcttccctaactggccagtcatgctaccttttaaaatagcctgccctcttagagatgaacttacttcatcagctaaaatcaattcttcctcaaggtgatattcccaaaggcttaacaaccgtttgaaggttcttatatctcttaatgtattgaggactaggatcgtagcacatatgccttcgggaacagacccaggccacagcactgcccagtttgtttaaaagtcccagcagctgtagaggttggtgtcttagacatgtgctattgctatgaagagacaccacgatcacaacactcctatagaagaaagcatttaaaaactgtttacagtttcagagggttagtccgttatcagcatggtgggatgcatggcagcacacaggcagacatggtgctggagaagaagctgggacttctatattcaaacccacaggctgcaggaagagagagattttggacttggaattggccttttaaaacctcaaagcccacccccaatgacacacttcctccaacaaggcctgtcttagttaggggtttactgctgtgagcaaacaccatgaccaaggcaactcttataagggcaacgcttaattgaggctggtttacaggttcagaggttcagtccattatcatcaaggtgggaacatggcagtgtccaggcaggcatggtgcaggaggagctgagagttctacatcttcatctgaaggctgctagcaaaatactgatttccaggcagctaggatgagggtcttaagcccgtgcccaacagtgatgcacctactccaacaaggccacacctcctaatgctttcaaatagcaccactcactagtgaccaagcattcaaatctatgagcctgtgggggccattcttgtacaaactaccacacagggtaaataaggaagnnnnnnnnnnnnnnnnnnnnnnnnnnnnnnnnnnnnnnnnnnnnnnnnnnnnnnnnnnnnnnnnnnnnnnnnnnnnnnnnnnnnnnnnnnnnnnnnnnnnnnnnnnnnnnnnnnnnnnnnnnnnnnnnnnnnnnnnnnnnnnnnnnnnnnnnnnnnnnnnnnnnnnnnnnnnnnnnnnnnnnnnnnnnnnnnnnnnnnnnnnnnnnnnnnnnnnnnnnnnnnnnnnnnnnnnnnnnnnnnnnnnnnnnnnnnnnnnnnnnnnnnnnnnnnnnnnnnnnnnnnnnnnnnnnnnnnnnnnnnnnnnnnnnnnnnnnnnnnnnnnnnnnnnnnnnnnnnnnnnnnnnnnnnnnnnnnnnnnnnnnnnnnnnnnnnnnnnnnnnnnnnnnnnnnnnnnnnnnnnnnnnnnnnnnnnncaccaccaccaccaccaccaccatcatcatcacctgtagcagaattttccccaaattagtttaaacaagaagcctgttattggacagggaaaaggaagatagagctaagagtttcagagacagagacagggacagggagggagaagaagggaaggagaagaagagataagatcgaacctataggagaggaagaggagccaggaccacacagtcttgggggtcataaatattaggaatttcttagatagatgattaaataataagtagggtgcttttaccccatctaggtgtgtagcttgtgtttatattaattgagttttgagttcattgtgtgggcgttttgtgggttgagaatttgctaatataaatctgactgataaattacaagcctctagagttttgattttaccggggctgggaatgtgagcagaatccgcagcaagagaaccgtgagatgggcggtggctgcatggggctaaccatggaggcaactaggtttccggggccagagagtagccggccatagcgcggaatggggcacttttaatatttccctgcaacaatcatcatcaccgtcatcgttatcatcaccatcatcatcagtcattctagggaaggagcaggggaccttcatgtagatttatttgaagaccacaaagtaaatcgattacaatttgccaattctgttttcctgatgggtagaattggatgtaggttgggggttggtgatggagaattaggtaagaagaactgactgggtttctcccagagcttactgcccaaagcctttggtccctctccctctgcctccctcaagccaaggagagtaggaaagcaatcttagaaaggtcactggggactctgaggaataaatagggctgctgcctcatgagaagacagtcgaggaagccagagtcacagcggtttccagggctctcatttccaccaccgaggagtctttgaaattacttttccgtcgtcattcattagtgtgctactacattccgggtcctttaattgtcttctcaaatgctacactcagaatgtgataccatctcacctgccgaaagtacgaggcccaggcttggctcccacacagcaccactgggcacccaccgtgcttgctgtggttgtgttggtcctttcaaatttgtatccacaccttcctctgtcacctcagtgccacatgctggacatgctccatcccccgatatcccactccggctcatgaacataccatcccctccatcctccatggtccagtgaggaattagaagtctcaagctagtaaagaagggtatgcaagcgcccactctcccacgtctgcacagagccgttaggtgatggcggctatcacccaagcgagcactgagcacaaccttgcctctccagtgcctgcgcagacccccagaggttgccggctatcatctagttgatgtttctctctcctggcgcctcaacatcagcattaaaacttatttttcccatcccaagccaaaaaagaacaaaaggagtcttttaaactgtttttaagaatgctttaaattgctgggtggtgttgttaatcccagcatttgagaggcagaggcaggagatctctgagttggagaccagccaggtctacagaacaagttctaagacagccagggtgacactgagaaaccatatcttgaaaaaaaaaaaagatattttaaacggtggtgaaaactttcgtataacatgaaattaagttgcaaatatcttcaagctcaagttagaatcatattgtgcaactgagctctagagctgtcaaaagtgaagctctggcctcttttctccctccagccacagccactgcgacccctgtccccttctctctatgcatttgacttctgactactgtaaatggtgatcctgtaaagctgggtgcccagaagttcctttcagagcaccttcagttccttcctttgagtaggtgatgtgtggctgggctgtatggtggttctagtttggattttcaaaggaactagcttcctggtttccatggtgactatacaatcctaccacccatatacaagctttctggttttcccacaagcttgccaacattctatcttttgtttttttcttttgacagtgtctgccccaagcctgtgaggtggcacctaattgtagggtaaatcttttcactttacaattccccattgctgtggatagttccctgtcccctccaagacaaaacaccaataaatagctggttttgttttctgattcacataccttccccactccctcatcaattcctaagtctttccaataggaaaattaaagttttcagtgcatctggggatggtggagcacacctgtaaccccagccttcctgaactgaccctcggagccagttggaacttctatctacctggatacatttccaccttctaaacctccagaaacctccatcagtgctcccccaccccaacccccacatcctgtgtccccgccccctcccccaccgccccatctgctctaggttggcattccttcacctcctgcctggaagccccttttcagcatggggaaccagaaagagtaagtgttacctgcctgtttaaggagctcagggtgatagatagctgaggcctgtatgtcctccaaagctaagcccaatctcacttcttcacccttccagcctctctctggtctcctttctcctgcctcaggaccttggcgcttgatgccctcactgccaggaatattcttcccctagataactgaattgcttgttcaatccaatctgtatgaaagtgacccacaccattctgttttaaagtttcacaaagcacacctcctcggctatttctcagactcctctcctcattgccagtactggcttgtctcacttctaacattctatagcatatattttatgctctttgcctctcctggcctgttacagcactaccttcatgagggtaatttttgtttgttcctggttgtatcacaaacaggtctggcttggaacaggataatacatatctgtagaatgactaagtgagtagatagagtataaggcttataatgatttgaataagaatggcccccccacaggcccatatgttccagtgcttagtcaccagggagtggaactgtttgggaaggattaggaggtatggccttgttggagtgggtgtggcttattggatgtctctgagaatggactttaaggtttcaaaagcccaggctaggcccagtgtctctgtctgctgcctgcagatcatactgtaaagctctcaactactgttccagcagcatgccagcctgcatcctgccatgatgacaatggaccctctaaaactgtaagcagtcctcagtgaaatgctttcctttataggagttgccttggtcatggtatcttctcacagaatgaacagtaactaactcaattgatccatggccctggggcactctttctccctaactgttagttgtttgttctaaaagtctagaggaaagtggtgtgtgtgtgtgtgtgtgtgtgtgtaagtcaacaatggaacataatacttggcccaccaaagtgtgctcatggatctgcagagatgtcctacctggggctcattagaatacaggatgcgaccccacacccagaatcaaaattggccttttttatgacacccacaagagattgcttggaaaagttgacaagcttggggattgagcaatggctcttgaactgtgtctaccactgaaagtcttctgaaacacctgctgcctggggccccattcttataaagtggctgaattcttctggggtaggctccctgcataaatcactggtgaaaaggagaagctaatgacttattatggtatccagcatctgtccccacttaccctccactgctgtccattactctgatctaacctagtgccaggtgcagagtgacttattggccccatgtctctggcttgtcttcaccagttccattagtgtaaacaccatcttctcacggtgacgtttcaggaagaccctcacagtggtggctactccttccgatccccatctgcattgtctgatggtttgctacaggaagtcactgctgaacagctagtctgaaacctggagagagctcatgctgtgagctcatcagagaatgggaacagcaccatggcctatctcctggtggatacagggagagcctacagctgggattctacctagcacagagctgtgggcagagcactgccctgcagtctgtgttctaatcttgggagcttgtgtgtcttaactgttcatgcctctctgtgttcctacacacgttgcctggtgctgtcatttcccgggcagtgtcaatgtaagggtacagagctctcctctgaggataatccaaatacaaattttgaacatgaacttgaatctgaagctctgttcccaaagctgaggagtaggaaggtgcaggagtgtgaaggtgtagagagagttagcaggcagccaggatggtcagggtggtatagagagcatttttagccatttgctgattgaactgactctcctgcagatcaagtctccagtgctcatgactcccttggccctgtcacctccacggagtaccccggaacccgatctcagctccatccctcaggatgcagccaccattcccagcctggtggtcccagaggctctcacaggtacgtctgccaaaggacttctaggtggcagtgatcctagagtaacccggcgtcctttcatctaatggttactttatgaatctaagagtttctctgaggtacttatttcactgggtgtgatgacacatgcctttaaacccaggaggcaaaggcaggctgacatctgagtttagggccagcctggtctacagaatgagttccaggatagtcagggctacagagagaaaccctgtttctgaaaagaaaatataaagagagaaaggaagaaaagaaaagaaaagagaagaaaagagaaaaagaaaggaaagaaggaaagagaaaggaaagaaaggaaaaggaaagaaaggaaaaggaaaagggaaaagaaaaagaaaaagaagaacaaaaatttcctgagatagctcaaagaaagatttgacacagtagcagacaggccagcccccattctctgaaagcacacatttctttgtcatgcagttccggtattaaaacctttgttttctggctggtaaggtggctcagagttaagaacactggctgctcctctagaggtcctgagtgcaattcccagcaccctcatggtgtctcatgaccatctctaaagagatctgatgtcctcttctggcatgcaggtggacatgcagacagagcactcctacattaaaaaacaaaacaaaacaaaagcaaaacaaacaaactctttgttttctgtggatgttgtgaatgacgggttcagctggttactgtggtgtgtacacgtgagagcagtggctaggtccgagtgtgctcacttgagtgtgcaccagaatgtgtccattctgcacttgtaattccagtggctaccatatcctctaacccagtcggtgtaacacatatcccacttctccctcctcttctctctcatgatgatgtatcagccaaccaacaacttcatcttgtaacaatagttagatgactataaaggcgtgagcatgcgcgcgcaccacccctcatcataacttcagtccttgctcccacccactacatcctctagccttttagcccctcccactatagtataaagactaaacccattagcaaggctgaggaagcacttccgggttctgagccccacccccagcccgtgattccactctccaggtgctgaccatggcatcttggcttgttctcttcctctgtttggaccgaccttcctgtctagtcaccccactgctgcctcacactcagctcagacgtactctccagaaatctcagcgacgcctgcatgagcaatcctgcctcttggatctttaccgcacgggggtctcacctcggcatctgagaactgaacattggagatgaggggaagggcgggcagccttggagaaacacgcagggactcttgcgttcagggggcattgtgtccaggttccacagtgcagccctgagccattctcctagcacttcagctgcgttgcttctgagcaaagccataaccacgcccagctcaggcttgcttgagcgcatgggaggtgcctgctgtcactgtctaactgtcccaaagccttgctggtcacccctaaagttcttagcacacactccccccccccccgacagtgacctctgaggagacactcttaacgtggaaggacggagaagccactgaaatatggaagataatatgattcctgttattaacattccgttttactttactctcatagaacttctacttctcaaatctattttacactatcaacaatactcacgaggcagagccttactatgccactggaaggggagaaaatagcatttccaccttactttgcagatagtttttctcaggagacaagctaggaaaatctacatttgctaaggatctggcattgggaacagagaagaaatcgggctttttaagtaggtcaggataacattattgttacttttaaatcttcaagcagctgatctggcagtagaggacaaggcgcattatgtcagaccagtctggagtcaggctgacctgttgggcaattactgtcaaattacaggtgaatagttgtgagtgggcacatacgctgcgttcttggaacacaagtaagttgaacttgtatctgctgacgtcttgtatcagagcccctcgaccaacagactgttatactaatattatttattattatatacataaatatatatacaataaatataattattatttacataataacaattagtattccattgggcaatcttctcagtagaaatattttctctaaaaagaacttatggtgatccctgagatggcttagtgggcaaaggtgcttgctgacaaactagtttggtgatctaagttcaatacctgggacccacagagagcatatccccttaagctgttttctgatgtccacatgtgtgcaccatagcgtgcctgatataaacacacacacacacacaccccaatataagaaatgatgtgtgaggtttcctcttttcattgtaaaattcattacactccccccctgtggtctcctgaaaatttattgaacccagataatcagtttaggagacaggatcacaggatcacagagacagcttgactctgaggagctctgacacaaccaggatcacaagaaggacaggctccagtcagacatagccagggcaggtagcactagtgataatcagaggacgggaggcaaacataagaacataagcaacagaaactaaggttacttggcatcatcagaacccaattctcccactgtagcaagtcctggatacactatcacaccggaaaagcaagattcagatctaaaatcacgtctcatgatgatgacagaggactttaagaaggacataaataactcacttaaagaaatacaggagaacacaggtaaacagctagaaacccttaaagaggaaacacaaaaatcccttaaagatttacaggaaaacacaataaaacacgtgaaggaaacgaacaaaaccatccaggatctaaaaatggaactagaagcaataaagaaatcatgagagggctggggagatggctcagcgggtaagagcactgactgttcttccaaaggtcctgagttcaaatcccagcaaccacatggtggctcacaaccatccataatgagatctgataaccttttctggtgtgtctgaagacagctacagtgtacttacatataataaataaatctttaaaataaaaagaatatttgatagttttatcaaatatatttattaaaaaaaaaaagaaatcatgaagggagacaaccctggagttagaaaacctaggaaagagatcatgagtcatagatgcaagcatcaccaacagaatacaagagatagaagagagaatctcagtcaggtgcagaagataccatagaaaacactgacacaacagtcaaagaaaatgcaaaaagctcctaacctaaaacatccaggaaatccaggacacaatgagaagcccaaacctaaggataataggtatagaagagagtgaagattcccaacttaatgggccagaaaatatcttcaacacaattatagaagaaaacttccctaacctaaagaaagagatgcccatgaacatataagaagcctacagaactccaagtagactggatcagaaaagaaattccttctatcacataataatcaaaacaccaaatgcacaaaacaaagaaagaattttaaaagcagtaagggaaaaaggtcaagtaacatataaaggcaggcctatcagaattacaccagatttctcaccagagactatgaaagccagaagatccttcctagacagacgtcatatagaccccaagagaacacaaatgccatcccaggctactatacccagcaaaactttcaattaccacagatggagaaaacaagatattccatgacaaagccaaacttacacgatatctttccacaaatccagccctacaaaggataatagctggaaaacaccaatacaaggagcgaaactacatcctagaaaaagcaagaaagtaaactttcaacaaacccacacaaatgtaattccacctctaacaacaaaaataacaggaagtaataatcacttttccttaatatttcttaatatgaaaatgaatattaccaacatctcctaatcgattgaaattcaaaaatatgaggaattagaaatttgttggctgtcatccagtggtctctctaatttggtaattggagaaataggtccaatattgtacaattcatatacactttctgcttgtttgtacatgacagggtcttgctgtataccacataatggtcttgaaatcatgcttctcctatctcagcctctctattagtaggattgtttatttgatgtttttacactgtattatggtattcagaacagcttacatatttcaaaattatttatacagccaaaagaaacatagacaattaatttgggaggtggcttgtaagagaacagcaaagagcgagactgaaggttttacttgatatttataattattgtatcaattttgaagaagaggaccttataagttattctttttctgagatgaatgcttttcaaagtcatcacagccaatgaactagaatcttaccctcacctaacatcagtgccacccttcaagcagaaccattgttcattgaaacagttgacgaatgacttcatggaaagaccatctcagcacacacaccatttcttaaatgaatgtaacctcttccctgtgggctgagaatgatgacaatcactcaattcaaatagctttgaccatagcaggaaagctgtattcaaataatcgtgtctactattcacttcttggcgcagcagaactgtcagctcttagcttagttacaatggaggtagaatcttttcgtgatgtgagggacattgaagtacagccttattacaatgaactccaatgtctaaaaattgttcttactttgggtttgtaccacagtaaaaaccacgattttaaagctctattaaaaacaaaacaaacaaatgaaaagactatctacttatgttcatttaataacatgtccatcattttatgattagtataaaaatatatattgtgttgaatataataaaaaaatcagttctaaaaaaaagaattacagttctagtaacactgtagttttcttcagtatgttttgcaagctgcatggtttattattaatttttgaactgtcattctttaatctgagttgtcttcaaattaattttatgcatttcttgtcagtctcctgaaccctgcttgatgtttaaggatctctctgttgaaccaattgtcagagtaatatattgtttatgaattttgatgtttggcatcaataaactttcaaaatataaaaaaagaaaatcagtttagaggcattctgacacttttctatagatttatgttatataaatatacttacctataaaatatacacaatacattaacagttaaaatgtcaatgaacacaatttatgttcaaaatttcacannnnnnnnnnnnnnnnnnnnnnnnnnnnnnnnnnnnnnnnnnnnnnnnnnnnnnnnnnnnnnnnnnnnnnnnnnnnnnnnnnnnnnnnnnnnnnnnnnnnnnnnnnnnnnnnnnnnnnnnnnnnnnnnnnnnnnnnnnnnnnnnnnnnnnnnnnnnnnnnnnnnnnnnnnnnnnnnnnnnnnnnnnnnnnnnnnnnnnnnnnnnnnnnnnnnnnnnnnnnnnnnnnnnnnnnnnnnnnnnnnnnnnnnnnnnnnnnnnnnnnnnnnnnnnnnnnnnnnnnnnnnnnnnnnnnnnnnnnnnnnnnnnnnnnnnnnnnnnnnnnnnnnnnnnnnnnnnnnnnnnnnnnnnnnnnnnnnnnnnnnnnnnnnnnnnnnnnnnnnnnnnnnnnnnnnnnnnnnnnnnnnnnnnnnnnnnnnnnnnnnnnnnnnnnnnnnnnnnnnnnnnnnnnnnnnnnnnnnnnnnnnnnnnnnnnnnnnnnnnnnnnnnnnnnnnnnnnnnnnnnnnnnnnnnnnnnnnnnnnnnnnnnnnnnnnnnnnnnnnnnnnnnnnnnnnnnnnnnnnnnnnnnnnnnnnnnnnnnnnnnnnnnnnnnnnnnnnnnnnnnnnnnnnnnnnnnnnnnnnnnnnnnnnnnnnnnnnnnnnnnnnnnnnnnnnnnnnnnnnnnnnnnnnnnnnnnnnnnnnnnnnnnnnnnnnnnnnnnnnnnnnnnnnnnnnnnnnnnnnnnnnnnnnnnnnnnnnnnnnnnnnnnnnnnnnnnnnnnnnnnnnnnnnnnnnnnnnnnnnnnnnnnnnnnnnnnnnnnnnnnnnnnnnnnnnnnnnnnnnnnnnnnnnnnnnnnnnnnnnnnnnnnnnnnnnnnnnnnnnnnnnnnnnnnnnnnnnnnnnnnnnnnnnnnnnnnnnnnnnnnnnnnnnnnnnnnnnnnnnnnnnnnnnnnnnnnnnnnnnnnnnnnnnnnnnnnnnnnnnnnnnnnnnnnnnnnnnnnnnnnnnnnnnnnnnnnnnnnnnnnnnnnnnnnnnnnnnnnnnnnnnnnnnnnnnnnnnnnnnnnnnnnnnnnnnnnnnnnnnnnnnnnnnnnnnnnnnnnnnnnnnnnnnnnnnnnnnnnnnnnnnnnnnnnnnnnnnnnnnnnnnnnnnnnnnnnnnnnnnnnnnnnnnnnnnnnnnnnnnnnnnnnnnnnnnnnnnnnnnnnnnnnnnnnnnnnnnnnnnnnnnnnnnnnnnnnnnnnnnnnnnnnnnnnnnnnnnnnnnnnnnnnnnnnnnnnnnnnnnnnnnnnnnnnnnnnnnnnnnnnnnnnnnnnnnnnnnnnnnnnnnnnnnnnnnnnnnnnnnnnnnnnnnnnnnnnnnnnnnnnnnnnnnnnnnnnnnnnnnnnnnnnnnnnnnnnnnnnnnnnnnnnnnnnnnnnnnnnnnnnnnnnnnnnnnnnnnnnnnnnnnnnnnnnnnnnnnnnnnnnnnnnnnnnnnnnnnnnnnnnnnnnnnnnnnnnnnnnnnnnnnnnnnnnnnnnnnnnnnnnnnnnnnnnnnnnnnnnnnnnnnnnnnnnnnnnnnnnnnnnnnnnnnnnnnnnnnnnnnnnnnnnnnnnnnnnnnnnnnnnnnnnnnnnnnnnnnnnnnnnnnnnnnnnnnnnnnnnnnnnnnnnnnnnnnnnnnnnnnnnnnnnnnnnnnnnnnnnnnnnnnnnnnnnnnnnnnnnnnnnnnnnnnnnnnnnnnnnnnnnnnnnnnnnnnnnnnnnnnnnnnnnnnnnnnnnnnnnnnnnnnnnnnnnnnnnnnnnnnnnnnnnnnnnnnnnnnnnnnnnnnnnnnnnnnnnnnnnnnnnnnnnnnnnnnnnnnnnnnnnnnnnnnnnnnnnnnnnnnnnnnnnnnnnnnnnnnnnnnnnnnnnnnnnnnnnnnnnnnnnnnnnnnnnnnnnnnnnnnnnnnnnnnnnnnnnnnnnnnnnnnnnnnnnnnnnnnnnnnnnnnnnnnnnnnnnnnnnnnnnnnnnnnnnnnnnnnnnnnnnnnnnnnnnnnnnnnnnnnnnnnnnnnnnnnnnnnnnnnnnnnnnnnnnnnnnnnnnnnnnnnnnnnnnnnnnnnnnnnnnnnnnnnnnnnnnnnnnnnnnnnnnnnnnnnnnnnnnnnnnnnnnnnnnnnnnnnnnnnnnnnnnnnnnnnnnnnnnnnnnnnnnnnnnnnnnnnnnnnnnnnnnnnnnnnnnnnnnnnnnnnnnnnnnnnnnnnnnnnnnnnnnnnnnnnnnnnnnnnnnnnnnnnnnnnnnnnnnnnnnnnnnnnnnnnnnnnnnnnnnnnnnnnnnnnnnnnnnnnnnnnnnnnnnnnnnnnnnnnnnnnnnnnnnnnnnnnnnnnnnnnnnnnnnnnnnnnnnnnnnnnnnnnnnnnnnnnnnnnnnnnnnnnnnnnnnnnnnnnnnnnnnnnnnnnnnnnnnnnnnnnnnnnnnnnnnnnnnnnnnnnnnnnnnnnnnnnnnnnnnnnnnnnnnnnnnnnnnnnnnnnnnnnnnnnnnnnnnnnnnnnnnnnnnnnnnnnnnnnnnnnnnnnnnnnnnnnnnnnnnnnnnnnnnnnnnnnnnnnnnnnnnnnnnnnnnnnnnnnnnnnnnnnnnnnnnnnnnnnnnnnnnnnnnnnnnnnnnnnnnnnnnnnnnnnnnnnnnnnnnnnnnnnnnnnnnnnnnnnnnnnnnnnnnnnnnnnnnnnnnnnnnnnnnnnnnnnnnnnnnnnnnnnnnnnnnnnnnnnnnnnnnnnnnnnnnnnnnnnnnnnnnnnnnnnnnnnnnnnnnnnnnnnnnnnnnnnnnnnnnnnnnnnnnnnnnnnnnnnnnnnnnnnnnnnnnnnnnnnnnnnnnnnnnnnnnnnnnnnnnnnnnnnnnnnnnnnnnnnnnnnnnnnnnnnnnnnnnnnnnnnnnnnnnnnnnnnnnnnnnnnnnnnnnnnnnnnnnnnnnnnnnnnnnnnnnnnnnnnnnnnnnnnnnnnnnnnnnnnnnnnnnnnnnnnnnnnnnnnnnnnnnnnnnnnnnnnnnnnnnnnnnnnnnnnnnnnnnnnnnnnnnnnnnnnnnnnnnnnnnnnnnnnnnnnnnnnnnnnnnnnnnnnnnnnnnnnnnnnnnnnnnnnnnnnnnnnnccacaacacagcacccagaatttgttcatatggctactggcagaatcgagaggaacctaaagtctagaagaaggtgcctggatcctgatgctctttttttttttttttaaagatgtatttatttttattatatataagtacgctgtagctgtcttcagacactccagaagagggagtcagatctcattacgggtggttgtgagccaccatgtggttgctgggatttgaacttcggaccttcggaagagcagtcgggtgctcttacccactgagccatttcaccagcccctgatgctcttaagagatgaaggcaccagcatcacagagccccatcatccctctcggcacacctgggatgctctgccttagcccaactcccaagagggagaatttatgaactcagtagttctacaacctctccaaagaggtgggattcccaccacgcctgcagtcccatgaatattcagagaacacatgcacggtttaatgggtaggcccgaggtcccgagactctcagagcaagtttctgtatcactaagccttttaaggacagagaggacttgcagagttctgggctagcatgatgacagccctgcggctggcccctggatcggagccatgtggagttttaaataaaaggcacgtggaagccacatgaactgagaaacccagcccaggtctttccccagccttccttcctgtcctcacggctggtcaggaggtctaagagaaaatgagtgctgaagaaggcctttcagaactgaaaagcgctacacgcaagaatggtctcttctgatgtctggttttaataaaaactagctatggtagccctgccatctgccagcctgcggggatataatgcaaaccaggaggctgccagcctgcagttgctctgagtgggggaagtccaggtcaaagcaggatgtcctctctgaggtgtctttgtctgtccctcgccctggagctggtgtgcagttctgagagggctgtgagcgagagccgggatgaagtcttctcagtgcctcaggaaagtgatgctgctttctgtccagagctgggacccagcattgctgtagagaggttgttttaaagacctgggttgctgctctgtgctactttgtgagttttactccctaacagtagagaggagagagacaaggatgggggggagggggggaggaatttaggaaaatccctgaatctcacttctttccttttgtttcatctttgaccatgggtactaacaaactacaaccaacctccctaaatgaccaccacccactaaccctgcctctcatggtcctctaatttatgtaccctctgaaaatttcccagaattccaaatgtcacatacctgcagaaactatctgtggctggcaaagacacgcttctgctagagcacgaggcaaatcatagtcagctgctgcagacagtgtgaagcagccccagatcccttacacctgcattaaaatttaagcacattcttatattttctcactttaaaaagaaaacagaatctcataattctcaaaatgtcactttagacccttttaaagactcttctctcagggtttcccgtacagccccttggggtcctctggtaacaagtggggtgtagaactggagttttgagggtgaactcaggtgtctgtatctgtctccttcctcagacatggctaaagagagaccctggaataatcacaaagtgttgaactgaagggacactggagtcaaccccagcagagctctcaaaaactgaaagccaggacagtctgaggaacaaaataaatgcatagtatctgacaacccaggacaaaaagcatgtgtccaggaatcacactgagtgtaataaatgacagaataaagaataaatgtggtgagatgggacaaagatgggggaaaagatgactttttctagcagaagaattgtatgtgatttgtggaatttgcccctattccagtcagaaagtattgttaaaaactccctccacccttgggtacaggcagactcagaatatggggaccagggtagaagggtgtggagctcattggttccaccaagcatggaagggtcacaccccagaagagcctgtgggttcaccatggctcctgtctgctgtgcagcgaagtctctgtagtttaatgtctttcctgtccccagtcctgtgtctccagccgtgagaaagaatatcagactaaagcaaacggaggtgcaacaggtctcgaggtatctgagcagacctagtcagagctgtcatggccgtgagaagggaggagaggctgacaggttgtcacagaccaaagagacagggggatgtgacagctgaggcagcttgctgtcctgggtggggccttagacaggaaatggcgtgggcgagacttccagtgtgattcagtacagcccacttacaaataaaagagaatggactgtcctggctccctcccagtgtccagctgtcagctgctatctctacttttccagtctctgcttccttcgatggaaagcagcacttgaggagtctgcctgtggtgaacagtgtgggctatgtcctccgtttcctgaccaaactgtgccgcagcctcctgtgtgacaacctcttcagccacctgccttttcccgggagcatcggcgcctctgacaaggcgcaggagagagaggatgggaggactgagtcaggtaaggcagaggtgttttgtctgctgcagatgctgtctcccaaggtgggcaggtgagatagttgctgggctgccatcctagagaggcccaggcctgtctctctgggctgtttggaacgttgtggtccagactattcccgtcctatgctgccgagaaatgtggtttctccagctcctgagagccgacagtctatctctgtggcatgattgcatagaatttagactgtaagaacacatcacatcttctctatccttgagtgggagtgattttcttccgcctactgtaaggaaacgctgggtaattaattgttcattgttgcagagttgttgaaggtctctgaaaccatctgcaggtctgtgctcacagacttagagcagaataaaaatgactacgggtcagagctggtgtactggcacgttcctgtaatgtatcactcagggagcggaggcaggaggatggtgaattggaaacaaacctgggctacacagtgatgttgtctttaaaacgaatgaatgaatgaatgaatgaatgaatgaatgaatgaatgaatgaatggctatatctcaattgcaagaggagaataagaaggactcttttagaccctttgagtagggtttcttggatcctatcaggaaggagccttgcctacagctttgttttgatcccatttagaccttggaagatggaagaaatttggtctttcctataaaaacgtagctgactatgcttacagtaggcagacgccaaatacctctgtgcatttcttcatgtctctatgtgagctacaaaagaccctctcaattctctagacctgtacttcctacataaaacaaaaaatcagagctgtggctagagtatcctttctgttacctccaagccataatgtactcagaaatgcatagttcattttctacaagatcttggcctgagactagcagagatacatggtttcatttctcaaacccttgacttgttgcactgatcaaacagagactcagaggacatggctaggaagacacaattcatgcttcctactgctcgggaagtctgttctctggaaccagctcttccccaactatggatgaaatttaggacaaatcttggcacttttcctagttcctttcatgttacaaaatattcttatttaacaactaatgtgtttggattggtgagatagctaactcagtttcctatgatgttgccagtttccaagtcactggcctgcagtggtgaaggtgggtgtggctggcttctttcatcaacccttggcccctcccattgatttcagaacacttcatagcagcttgggggatgaggaaagaaaagaggccatcactggtcttaacttgacagaccctgctatatacagggtgacattgtgttctctgtttctggcaagtgtttgaagctgattgtcatctgtgggctcttgaatggtcacctaatctgtcacccatgagctccttgatatggacaaatatttgctgctttttttctaggtagttatgtatattgcctttagggatcaactctagttctctctctctctctctctctctctctctctctctctctctctctctctctctctctctctcttcgattctggggcatcatggccatgacttgaacatgtgggtaagtattaagtgcccccagctcagcccatggtttttttgagataaggtctagaactgatggtcctcctgactcttgtgtggtgaggtttcaggagagtgccaggctcacacctgtcctctgtcacggacctgtttcttgagaaacacacattctttgtttgcctcaccatctcaccatgcaggctgagctctgcagggtggccctcttttcctctgccagctgtctgtagtctttcagactttcccagggacccagatagtaattgaatatataactcaagctccaggggacagatcccaaacattcccatggccatgttaaagccattgggaacttctctattattttgtttccagtcagccttttggtcagcctcatccttcttgcccacacattagagggctggtagtcatctactggagtaaaactgggctcgctccctgcctccctccctgtgagagtaggatgcaatatttactgatgaacatgattgacaggaggatcagtgagaaccctccagagaacagtgcctgccacttacctaaaggatccatgattagggatgtatttgtcccctcaacctccgtgagcaagttgctggtgaagccacatctttgagaactggctcttgggcatccaggaaacctgaggttggtcttccccaggaccacagtgacatgttctttttctgcaacatggtgcagatggacatgaggatttggccattgtgaaccatgcctactggccctggggctgcccaaaggctgtctgaagcctgtcagctccaaagctggacagaagtgacgctaaaaggtgaaagctttctacatgaaagctatccgtaagattggctgtaggcaagccagtttcttaatagtgattgttgggagagggcccatccctgggctggtggtcctgggttctataagaaagcaggctgagcaagccatgaggagcgagcctttaagtaacatccctccatggcttctgcatcagctcctggcttcaggttcctgtcttgatctggctttcttcaatgatgggccacaatttggaggtgtaagacaaataaactccttctttcccaacttgcttttttgattgttgtttgtttttcgagacagggtgtctctgtatagccctggctgtcctggaacttgctttgtagaccaggctgacctcgaattcagaaatccacctgcctctgcctcccaaattccttttgctcatgatatttcattgcagcaatagaaactgtaactaagccaggaggtatatgtgtgcacacgtgtgtgcacgtgtgtgcacgtgtgtaaaggacaaagctccatacagggagtctttatcagttcctcgacaccagttttaaactttctatggattccctgtgaactccacagcatgcactccaagtctgttcatctcctggtccctccacctctgctctccaccccagcaacctctcccatcccaaaagataacaacaacaaaaataaacaaaacaaaaacttgtctgggaagctgtagtgtgtcccacagtgcaccctttgtccacacatcttcacttgcaaatgttcattgccgtgagtcattggtctggcttgaggtctctggcttctaatacactatcaatcctggggcttcaggaggactcctctcagatatcctgttgttgctctgtgtcttggggatcctgcagctttggatctttaggactcagccccttacacgctccagcagtgcatagatggggtggttgttggggtgagccgactcaaagccctggatctgggcctgggttgtagttgagttggtcagcctgccagctctcctgtgtccacaccactagggtgagctctccagcactgcctggctaagctcacccagtgccacagctggcagggggcagaaccagctcttccattctcatgccctcgaggccaactcacccaagtgccatccagatgaagtgcaggcactctcctacctgccacaggcagccagggtcaagtgagaaagagcatctctccctcaaccacactaccataggcagataaggggtggggtcagctctcccacccctgtcaaccaggagggtctctgtgtgtcttctgctctccctcacctccatgggagggcctcttctctccacctttttattacgagaaaagatttcttttctttttaattatgtttatgtgtatgggtgcagggcccctaggagtccagtcagggcatcagacttcctggagttggtcacaggaggttgtgcactgcctgatatgggtgccgaggacataactgtggctcttcagaagatctgagctgctcttagccaccgaggctcttctctagccaagataccctgttttctcagactcttcttgaacttagagctcaagttgtttgcttactgacaaatgtgagagagagcatgtgcatgtgtgtgtgtttgtatgtcagtgtatgtgtgtttgtgtgtaagtgtatgtgtgtgagtgtatgtttgtaatttgtgtgagagtgtgtgtgttggtatgagtgtgtgtataagtgtgtgtttgtatgagagtgtgagagtgttgtgcacgcatgtgtgtttaggtgtgtgtgagtgtgttgtgtttgtatgaatgtgtgttagtgtgtatatatttgtgtgtgagtgtgcatgtatgtgtgtgtttgtgtgtgagtgtgtaatagtgtttgtatgtgatagcatgtgtgttttgtgtatgtgtgttatatatgtgtgtgtgtgtatacatatacatatacataatacatatacatatacatatacatatacatatacatatacatatacatatacatatatatatatatatgatgtgtgtgcctttgtatgtggagagagttgtgagtgtaaatataggagctctaggattctgactcacttcctcacacttgttgagcaaagcactttgctgactgaatccaactctccagcccccaaatttataaaaggacaaagcacatgtgactgttgcggaggcagaagagcctggggacagcccctcacctcctctgctcactcgcatttcccacacgctttgggatagaggcttggcagaactgccagatcccggggaaggtggtcacagagcctgcggtcctctggagacccaacggggagtcattactctaaacagctgacttcagtcaaaactgtctttggtccaagtttccaagggaggaaaatcaacccacagcttagaacaaagtctcgggcaaaccagaaacatgctggagagagaaagaaatgcaggtgtcaggcattaaaatgatggctgattgtgagcctctcatgagggacagggagatgtaaatgcactgaaatggaccagagaggagccagagttggtcctcgggctgagggattgagctgggggcaagctaaaaggaagaaaaatctatactggccagagactaagttaatggaaaatgtaattgaagcgaaggaaatgctccacccataggtggtgtggccctgtgccctttgaaccaagaaggcaaggcctgggccaccgaggccctaagggaaaacgaggattgcttatctgtaagaacaagggcgggactgagcctgggaacagaaaagctgcaccagagcctcctcgaaagctgcagagaaaggtgactatttgcgaccttagagtcccgtagaggacacggagacccacagcaactggcacgtgttgggagctgcagcccctgggagtgtgggctaaactgtcaggagcacggactctgcacccaggtaggatgacaggcacctgagtctgggctgagaggcgaagtgggagcccccagcgcttcccttcctgcctccagcttctccgctggggtctctgagattccagactcttctctccaggcgctgctacctggccagacctccctggtaagaacaccacagctcttggaagctgtgcctagcaggcttcgctccagccttttcttccctgggctttgagactgaagtgctgccaggtctttagtgtagccagaccaagctgttcttgcggaaccctttgaaccctgccgaagaactaggcagacctgcaaagggccagaccatccctgagaaaggccgtggccttcagcctgggggaaggtagtattaataactcttccaagggcttattctgtacaggagagagatagagagagagagagagagagagagagagcttgcacacgtgatatggcgtgcatgtgtggtgtggtagattggggagtggaaatggtggaaggcatgttagtttctctggacatcaccgggtagaggtatcgtgtgagaagggttttgccggtggttttcttgctgcatctcaagccttcattagagattactagtaaagtattgctttgatccacggagtaaaactcatggtccaagctcccttgcctgtttgcagtggagcccgtgccttccttctgcagagggctaaggcttgctctgtgtgtctgtgttttgcacacaggtctcccttgcttagggactctcttcctttgtctcttggctctctccttgtccctctttcttctgctgctaaccccctttggagttctccaggacggtgaggtgagtggcttgcccaaaggggtcctggaagcccccctcactcccattgtaaccccagaccagggtcaggcagaggaagggaggaacttttttcctcaaacggagaaacttagacaggaggcgcctcctgttctagagatgtctttggtttcaggcttttatacatagcaacggaggaaacctcagtccccaaacagatccacaatggggaaaaagaaacacaaagctatccagaaagttccccagacacccaaaccccaaagacctgccccttcccggttctccccccactccccgcctccccgcccccatttgtatgcatgtgctgcgcacgcatgcgcttgctgctaagctggagcgagctcttgtgtatacacagaaagcagtttattgttttctctgaaggaggcacggaatgatttacgagtagtttctctggggtctatggacacaagggactcgcaaggggtctgaggcctgcctttgcccagctggcctttccacagccccaggctggattctctctctgggggcagacagcttatttccgatgagcaggggtcttgtgagggcccaggagagaatagacaccagtcctgtttcctgccaggcctgtagctttccaggtctgtgtggaaggaaggtgaaatctctgaggagattggttctggctgattccaggtctgctggccccatctgctgttcacactatggtctgccgcaaaactgaaagtagttctccctgccagcaaaacggtcttcctttgtatttcacagtgcagtcaagttcgtaggggcctaggagttccgcatacctgtaacccatctatctgtctgtttaatgacgtcatggtttttaatagaataaagaacatccactaccatgctttatattaaagcaagcacaattaaacttaggtataagagagaaatttcaatcagtagatttgcagcacagtggcctagctttgggggagactgtaagattccttggtgaagtttttactttatttcctttttatttttgtatgtttgtgacttcgcacatgtgggtgcagtaccaacatcagccagaagtgggcataagatttcccctggcgctaacattgcagacagttgggtaaggctccattctaaacccattcagggtgggtgctgagaactgaactcaggacttctgcaagagccatacaaattcttaaagcactgagccatctctccaggctcccgagaacacttttcaataagaggctcagttactatagaagataaagattgactggttctagcttagcacgttcccagcgctagcgtactgtaaccttgtcaatttttactatctctgaataatacctatagacctgtagacttgagatgtccctttcaaccgactcactccttcctagcaagacttacatcaaggatataattgtttagtttgccaattgtattttgtagatgtatattagaataaatgactattaaaaattaacagtcacgtgtggtcacttatacctgtaatctcagcacttatcagaattgatgtaagttcaatgccaacctgggctacattgtgagttccaggctagcctgggctactgagtgagattctgagtacagcaccaaccaaatctgtttacttatcctcaaccaaaccctgtcctcctaaacgctgcatgtttaagtcctagccctaggtcctgtgaatgggtccttatctagaaatgcggtctttgctgaaaggatctattaatagctgacgagatcccattggattggggactgcttcaaagtagaaggaaacagggatacattgacactcaggcacaagttttgtgtagataaaatgtttcctttgtgcccactcctaggagtacaattctgagtcatgtgacagttctgccttatgcgcctgttttcctgaagtgtccgagccatcagcagaacatgagggctctgatttctctgcagcaccagtgagcgtctgtcaaggaatagcgtctgtctattcacggctgagttgttagatgcagtctggattcaggtcccttgttaatctctcctggcttgtggctttggtttttgtttgtttgtttgtttgtttgttttgttttgtttttgacaacgtttttgaagaatacaaggcttcaattttgatgaagtccggaatttggttgttgtggcttttgtggctcacgcatcaaatttactcatttatttagactgtgtggcactggctggcccagaacctatagtaattcacctgcctgtctcccgaggtccaggattagaggggcacgtgccacctggatcatgccagatcttaagatcacatttccaatatttttgtcctcacctcttacatttcctcttaaagggattttaaatttcattttaacttttcctataaggtaaagacaggtcaaattgcattgtttcttgtgtggttggttttctaagccctgtctgttgaaagacttctttccttcctcactaaagggccttagcagacaaaccatcgcatgtagataaatgggcttatttccaggctctgagttctgcctccctcattcatccaagtgtccatcctccgcagaactgtgctgctatggttggtcactctttcttagctgttatgtttgatgctgtgacctgtagactctctacgttttgttttttactgtttatttctatttctctgatcttttataattccatgagttttagaaccatcttgttaattacaataaagacacgagccgagattctagcagagattgtgctgattttgttgaacatttttagtgtgttgccaccttagcgattacacacacacacaaaaaaaaatctattaaaagatggtggttttactattcatttatatcttctttcaacagtgctgcatattttctaggatataaattgagatttcttctggtcaacttatttctaagtgtttcactgtttttagtctcactgtatggtgttgccttcttgatttcattttagatttttggtgttcctgtgttgattttgtgccttgcagtcttgctggtaatttattggttccggtaattctaaaactgagttctctaggacttcctatgcacaggggtgattttacttccctttccaatctggaaacctgccctggcttttccttatcaaatcaccatggctggaacctctaatacaaagccaatgtggccacagcagtgctggccacagagagcagcatccagtctttccccgtagatccttagttgaggaagtccccttctgtccaggctgattaactgacctatgtcatggaatggtgtagggtttcgtcacatgctcttctgcgcctagtgagatgatcatgtagtctttgggtttttgtattacaccaatatggcatattaacttatttttggatgctaaattacctctcaatttctccttggttgtggtaactcttcctgaagcgcatctcgttcaatctcctcggtattgggcgaaggacttctgcttctgtgtgacaggagactattacctctagtcctcttttatccgatgggatctgtctggatctggcatcacagtgacaccagcttcacagaatgagttgaaaagcattctctcctcttttattatttttttggggaagcatttgtgaagaatctgtatttttttttcttgaaatttttggtagagtttgcctacaaatcatttatatcttgtctttctttgtggatattttttaagtggctaactcgatctcttgctgcaggtctgtacttctcagattatcattgagtcagctcctgcaattttcccatttcattcaaagtacgtaattatttacagtcatttgtaacaaactgtaaaaagaattattctagctagcccatataaaagacacacaatccaggtattttatctacaagctgtaaacctagattgggcaggcttgaagctcctctaactcacatcccagccacaggtcccttgttccttgctgtttctcctggctttgtgctcctggtccaccttcactcaaacctcaagtccggcctttctctccctactgcccaatcacgagctctggccttttattagccaattaactttacaaagggaagcaccccttggtgtacttggaagaactctttgctggcatccagaccagtagttagcatttgagtgcacagaccaacgcccagccgcatacttaaatttttcttgttcctgtaaggttgagagaaatatcttattatttgtgaatctagtgatctgagttgcctatacttttgtcaagacattcaaagatttgccaactttgttagtgttgccaaagaaccagctcttgttacatatttttccccctagtgtttttctatcagattaacgtctgctcaaacctctatccatttgctgtaaatttaatttaaatttactcagtttttaatgtcttaaggtgaatggttatatgaaattttttatccttcacaatataaaagttttaaaattttattttatgtatgtgtgttatttgcctgcatgcatgtctatacaccacatgtgtgtccaatgcctgcagaggccagaagaggatgttagatcccttagaactgtagctgcagacagttgtgagctgcatatgggagctgggaattgaacagagatcccttggaagagcagccagtgctcttaactgctgggccacctctccagccctaaaatagaaaatatatgcactacaaaatttacctctaagtttctgccttactcttacatcttggtagctcttatttccaggaagtctccatgaagtccccaggagtgggacctgccacttaccctaataatatcaaatcttagtttttcagtaccttcctgcaggaggaaccgagacaaggggaaagtgtcagagtctagcaaccctaaatatgcttcttcattgccaatcctggaatacttaaaaaaaaaaaaaaaacaactgattgtaggtgttttgggatatcaggatctgttttgatgatatttcatatttgatgaaattattggtggttttgactgggttgggagtgaggaagaataataatatcctctttatttttatctctatgtcatatctagacctttttacacacacacacacacaaacacacacacacacacacaccatttggccacatataatttattttcaggtgaattggggccgagatcgccactgggctgtctatacacgggagaacctagctcttggttcctccctggcgaggcaaggtccccatctgctaccactgctgctcagagctattctgtgtgttcatgccccctctctgcccatgcttactggtaatagtgaccatgtcagagccagctttgtcaagacggaggctcgggagctccctgcgcttctctcatgcctgctctctgtgtcccttacattttagccaaggtagccacggctgaagagtgtctggcaaacgcagtgggcatgaaccgctacgccatggactttagccacaggggctccgtaacccactcttcctcactgtacaagaggctgacctgcggagacagccaccttgccggaggccccgccaccaccaccagtggttcccgcaccaaccctgttccctctggaggttcgtcgtcacctggactgaggctgccagcctccagccccaagaggaatggaacagccatcgaaggaaacagatgtggtaatgcaatgcacaccctagaaacactgcataggggagaagttagagtgattttgaacatgacacctctgggaaactagaatgttccacaacccccttgagtttttattattcgtttaggcagccaatctaacttctgatcataagtgaaccaaagggcacattagcttaggaataaccagtagactccaaaatgcccacgggctcaaagatcaaagacagattagttcaagagtccaaagtggatgtcccacctccattcagggacccttgttctgttcctcttgtgtctctaccatgcctgtctgtctttacacccctgcatctagtggacaggacggggatggcactatgatgcccaggaagagatgggcatcagtcacaatccatcggcaaattcattcatccatgactcaagttccctggagaaagcagagaagacacaaagtgtttccatgctggtcggtcattaggtcctcttgtctccctcacaagggaaacatacttcacgaaagtgttcagagggacatagggaattaagtagaggccattctgatagatgctttacaacaagtgtccccaatctgcaacctggaccatctgtaacccagagtggcgtgaatttagtacaacacgtggcatacaccatcatatcgcatgtcgaaagatcagacacccctgcttcacgacgtcactgacaagctatgcattagtggattagcagctgtagcgtgggtaccttggtggatgccgcagcctggaattctgacccttttcaagtcctggtttctctgtgcttctgtttccttccccgagaaattgaaatcgttacctcatagaatcatacagggaaggttcaatgggtttatatgtgtatttaccaagggtggaaagatcagcagagaccccttaaaggagacatagctctgaaaggcagaaaaatgaaattattcattctttatagttgcaggaactcttcagtataagtattccattgacagtgtctctgcagggtgctaaaaggagaaaaatgcaaattacatatacctgagcaagccactcagagggttgggtctctctctggtctctgcttcccatttctgctacacctccttttctagaatctagtcacacggccactagctgcaagggaaactaggaaaggtggttttagttccaagtggaaatcctgttataaagaaacgggggaagagatgttctgcaagcaactgatggtctgcgaaacccttccttgttaagaatgtttgcattcttcattcctccacccccagcctcacccccagccccacccccagccccaccctcagccccagcccctctcccagccccacctggcacttcattcctatctaagtatgactctatcctgccacagtaccatgactccaattttgtgagtgcatcatttacatttgaatccctcacagtcaagcaaaggggagcttgtgtcatttagcgagagcaccaactatggacctctttctttccttccttccttgcttgcttccttccttccttcctttctttctccagacagggtttctctgtgtagtcctggctgtcctggaactcgctctgtagaccaggctggcctcgaactcagaaatcctcctgcctctgcctcccaagtgctgggattaaaggcgtgtgccaccaaggccccgcttacggaccactttctactgttactatttatcataaattataacatattgctcataagacatgttatattgcttatatacgtatttctagctagtggtgggtcaagaggcctgtcagttgtcgaaccaaattgacttggctgactccaaagtctggtctgtccaaaccgcttcaggatctctggtctgtgcttgcagggtttcttggggttctttgtgatatggaaggggatggagaagagtgtgaggtggacaggactccagccctgctgtaactctttatcaagcatatttgcattccttgaaacaatctgcctagctaccagtccttagaaagcatggtggctcagcatgctgaactgagtggtataataggagcctacctgccagcccgcagctccctgctgttgggtccttctcgctcccccacccccaccccacccaggtctctattcaaaccttccctttctcagaggactgcttggtgtgcctctgaagttacatcccaggtgagaaccactggcacccagaaacttctggcacccagaaactttctctttagtgtgtttgacccaattcataaattctggaagaaacctagaactggattttctccccatgtactaaccacaatggtttaaaaccacagagtctggaaagctaccccaggctgcaggcaggagggcgggggggggggggggnnnnnnnnnnnnnnnnnnnnnnnnnnnnnnnnnnnnnnnnnnnnnnnnnnnggggcgtgcaagagttctcagctgcctttccctccactgtgaatccttcccttcccgctgccccagcaggagctggtgcctgggctgcagcagggcaagagattccctgaggtttgctgatgttcaggtgaacttttgggagcgtctgtttctcatctgagatacactcagccagagctatgaaaggtttccgacaacaaagcttcctgcgcgtgctatagaattcccaaccacaggcattttcaagaggtagacgcaaaagcaaaatacattgttgttacagctcaaaagtttcctgtgggctgcagtcggtttcgtgggctatggtgtcagtaccggagacaattctgctagagaaagcgtggggatgggggcctcatatgagggctgggatctgcagaggggagaaagggcttcttcattgtggggagacaggagagggggccgggatgatgcaggcgaccagtgaatggtttgggggtgtccatgtcaggctggtggggctttggttatagtgattgtaaaccacacatttctgagcccttaggggatgagccgcccgctggtggtgggatttagggaactaaaactactggatatttattgaacaccatagaagtacactgcctagctttggagctaactctgacctttacaaccttgtcctgtttgatccttgctgcttttacttgtagacaactagagactggggtgttctggtctgcagatgtccactgagtacttcagcagggctttttcctcagcagggctcttctcagggctgagggtggagctgtgaacaaggcagaaggatcccattccagagagacctcaggacgttactgtgattactgttggaggtggaaaagtgtggcctgtgtgacggggctggaaggggaggggctggaaggggaggggctgcaggacagtgctggaaggggaggggctgcgggacagtgctggaaggggaggggctgcgggacagtgctggaagggaggggctggaaggggaggggctgcgggacagtgctggaaggggaggggctgcaggacagtgttggaggggaggggctgcgggacagtgctggaaggggaggggctgagcgacctcctcatcctgggagtcaggaaaggctccagtgtcctgaaatgggatctactgaaatgagatttgacatttgagcgttttgaaggacaggtgtttagaggctcctggtggagatcacattgcttcatgggaagcaggtcggggctaacagtgtcagtttctggctgagaaggaatgcagcccaacctggcttgctggcccctagggacatcttctgtcctgttggcaggtcagcttgtcttgaaggattaataaaaaacaaaacaaatagacaaaaaaaatctgattagaatctaaggaaggatcagggtttttcctctctggtctctgtcgcctcgtagtatcttaaaagctggaactgaaagaatgtaaaacaactcggtttcaaaacagattagactgcttagactgtgatgtgggctagcctgggcacctcacactctgcatagccttggacacacacctgaggccttcagaagtgttacttattgtcagcagtctgcacagcagtctgtgcactgggtcatgtggtgcctgaggttggagggaacacacacacacatacacaccacactctggagaagtgcacagctgtaggaggtaggaatttctgactcctgactcatcctggcttaccactcccttgttctactctcccactctgttagctaaagtttctcctgaattatgaatgagcgaaaggcaattatgtgtgtgctcgtggggatgcgtgagagggaaagagatttgcagatgtggtctgagcaccatgcttcagaaggcgccagcgggattgcttttcagcacggagtcagtcggtggtctctttttctgctaactgtgaattcaccttcaggagcaacaagatttaattatgtacccattcaccaccgggtctcacttttcacggtttaacagcccacggggagcaacatgaccaagcacagcttccctagtgctgtggacggcgagtgctttgcacgctccgtccgcacaggagcaagacttgttcaatacatccaatctcgttcatctgtcatgtctgcctgcagccccttcctgtattggactggacccatctgtcttcctgacaccttcctcagcagctggctggagcggggagccagtggtgtgttgacttttctctgtgagcacacacctgcaccagctttgcaaacccaccgctggaacgttccattgcccttctctggagcaaatgtacatgctttggaccaggagcaactgccgaggtgtgacttagcttaccagctgccctgcctagtgtgactgaaaggcccctcagaaacacccatgagccagtctggctgttcttccaccatcctgtaaaaggggaaatgcccacagctggtaccaagtcccaagcacagatagtacttgcctcagtgctccaagagtctttacagccatcactgagaacactctcctcaaagatgaccaggagccctctcttgtgctgtagtcagcgtctgctgttcctgacctcgctcaaagggcggcctgaccctgggcaggatcttatcagtgggccggacttcccctccttcctgccaagtataggaaattagatttgacctccactctcatccctgcagaatcattcttggactaaagacttcccgcctttgtagtccggacatctattaccaccctgattaacagccatgctcctgtgggcgggcctcgaagacagatgtgatttctgtgcttcttcagccccacgttgagtgcagatgtctttaaatggactaaaaatcatctttcactagtgggcatccatgttccaaaagctccagttcctcagtgagatgcctggtgccacaccacctcataggacccttccatgtccaacaaggaaaaaaatcagggaaaaacaaagcaaaactcaaatgaaatctagttctcaactaggacaagtgcagacatgaatcttcccaggtctatcaagagcaggaaggggagcacagacgaaaactgttgtcttaagacttagggaaggttgacaggcaccggcttcttagctcctagaattttcctgtagggcagttgctttttgttcagaatcctggctttttttttttttttctagcctggaagtggtggcaaggatctctcacacaaagctagcctcttttacaaagcatatcgatccatctcacagtcatcaatatcaagaatatttattctctgctcagctgtggagggggtcaatataatatatgaccctggtaatgagaggacttgggttgtattgttcaccaaacaccttacacaagactaagacgtggaaagagcttgatacatgattgtaaaatagacatcggcggattcttaaggagttatattaaaatataaatataaaatataatataatataaaaggtaggcaggtgattgtactacaaaggatgtgggacacattcaagaaggatagataaaggtcaggtggagaggtaggtgatagcaagaaggatggccctggtggtcatgaaggggtctgatggccccgggcttgcatgcacgtgtgttcatgttctctcaagatctggatcaaaggcaaattgtcttcttgcctcaggatccggatcacaggtgtgccctccattcctggattgtacttcattccacatacagtcaagttgacaactgagaatagccatcgcaaacagtttgccctgagggatgtgcagggagcctctttcactctgtagagcacctgtggtaggttgaccagaaggcccagtgcttgcccacttcagtacctatagcagcttctccggctggagaatgttaccacgatccaagacacattgcagtcaaaagacaagcaggggaagctcccaaactcctttccttccatctaagaaggaaaggtatggaaccacagtacagctgttgacttggaggcacagtgcataggcaagggggactcagagggaccttgagtgctagaaacgtacagtcagagcttggtctccgggacaactgaggcagtgacagtcccatgctagatagaaaagagctgaagcaaggagacccacggaaaaatcattgcagggtacattgcaggcacatttctgacttcccccattcttagtagcaagtacttgacaacaagcaactgaagggggaggggacacagtttcagctcacggtttggggtgaccacccctcatgacaaggtggttgtggaagcagaagttgcctgaactggggcagtgaagcttgatcagtgccagctgtgccagaaagcagagagaggagaccatgtgcttacctggttgtcttggttacagagtctttgtgtgataaaacaccatgaccacacgcagcatagggaggaaagggcttcattcatctcacagcttgtatcccaccatccagaaaaatcatagcaggagctcaaggcatgactggcttgttcccgatggcttgctctacttgcttgctggatttctttcttacattcttcttgcctttctttttccttctttccttnnnnnnnnnnnnnnnnnnnnnnnnnnnnnnnnnnnnnnnnnnnnnnnnnnnttccttctttccttctttccttcttttcttctttccttctttccttctttccttctttccttctttccttctttccttctttccttccttccttccttccttccttccttccttcctccctccctccctgttttctttccttccttcccctttctttctctctctttcattttcttttttcctctcacataatacatcctgactgctatttccctccctcctctcctcccagtccctcttctacacctcccctctcccccaaatccactgcccctctgtttctcttcagaagagagcagcctcccagtgatatcagccgaacagggcataacaagttacaataagaataggcacaagtccttatatcaaggctagatggagcaactcagtaggaagaaaagggtcccaaaagcaggcaagagagtcagagaaaccctgactcccacaagaacaccaagcaaccataacacatatcataactagcccagatccatgcaagctccctgattattgcttcagtctctgtgagtccccatgagccctgcctgcttagttgattgggtgagttgtgttcttgttccttgacctctctggttcctacaatccttccttcccttcttctgagggattccctgaggtcagcctaatgtttcagcctaatgctttcttttagcacccacaactatcagcccgggggttgcagtgcccacagtgagctggatgggccctcccacaccaaccatcagtcaagacaatgtagcacaggcttgcccacaggccagttgggtgggctcattatctcagttgaggttccttctttcagaatgattctagcattgactgaattcacataacactagccagcacactaaccttctcccccagtacctcatccagtctgagaccccatcctctgcggtggcactgcccacattcaggctgggtcatccctgaggtgtgtctcctgggtgattctaagtctagtcacactgacagtacaaattagctataccattagtggtatgcctttaccaaagagtcggcaagcatggcgggggtggggggggggnnnnnnnnnnnnnnnnnnnnnnnnnnnnnnnnnnnnnnnnnnnnnnnnnnnnnnnnnnnnnnnnnnnnnnnnnnnnnnnnnnnnnnnnnnnnnnnnnnnnnnnnnnnnnnnnnnnnnnnnnnnnnnnnnnnnnnnnnnnnnnnnnnnncccaccccaccccaccctggtgctgctggaggtataaatgaaagattagccattgtgcaaagtccaaaagtgaagacccacctctgttctgccacattgccatctccagaggacatagggagggcccagtattgcttggccccacaggctacagaggcccattttgcttaccactcagctcaccagccccaggcaccaatagctgtctatagcagaccctggtccacaaacacgaaacggaaccgaacgttagctagaattttgaaccagaatttcagtttgtcaaggatgagagctctcccaagccttcttccatgggcagcagagcacagagaggctgttgccctttgcgcctcactgaccagccactcaaagcatctacctgtctcagggacacatgcggtggacttcagagcactaaggactccatctgggaaagctaagggcttgggggtgacccagtaggcagcaccagacgggcactgagtttcactggctcatggtccccctcctctgctcactccctccagccccgagcccctctccggaggtgcaggataccaggcgaccaagcagcagaaacccttctacctggaccgtggaggacgtggtccggtttgtgaaagatgctgatcccgaggctctgggacctcatgtggagctcttcagaaagcacgtatgaaagtaatgggtctgaagggcgggccagggaaagagaggcatggaccgagggaggagatcgggatcctccagacgctgtcactctagactaagctctagcagtgcccttaagtgagtcagagatgggagagacagaggcaaccataggcctggcagaggagagccactgacagatttgtgtttttaaggaatatgtttctcttctgttctctctcttgggctttgcctgattttttgctaatccattcatccatcatccatctatctgtccattcacccacccatgcatcatctatccacccattcacctaccagtctgtccatccatccatctctccatccatccatccattatccactcattaactcatccatctgtccaatccatgcatccatgcatgcatgcatccatccatccatccatccaaccatccatttacccaccaatccacccatctctcatctgtccttatccatgtatctgtccacctgttcatcaatcatccatctgtccatccatctactcacccacccatcttcccatccatccatccacccacccacccacctgtgcattcaacagtcatctatagaaccctgcaatatgccaggcaaactgtgatcctgtgctcttactgcttagaccagtggctttcaatcttcctaatgctacaaccgcttaatacagtccctcatgttgtggtaacccccaattataaaattatttttgttgctactttataactaatattgctactgttatgaatcatgatgtaaatatctgtgttttccgatggtgacccctgagaaaggatcaatcgaccacaaaggggtcgagacccacaagttcgaaaccactggcttagagggttaaatgagaaaatgcacattaatacgttacatgaggcctcactcatatacagagccttcacatcaatgttataatcacgtaggcgcttttgaaatatacaaagatagtaagtggggcaaacggtaagaattactgttacctgcccagcttacgatattaattctggattggtagtataacgaattgctacaaatccagggtctttagacaagagacatctcttatctctatttctgtgggtctggagcctgcctggatctcaggcgttggcagggataaattcgtgtctaggtgttctagggacaatctgcttgcctgcctttctcagcttcacgaccctctttaaagccaggatcatcgaccctggtcctcctcaggctgacctgtctgtggctctctctgtctttacctggatagatgacatatacatgagatagtaggaatgcaggcgaaactgtctgcttcaatcaaacaagggcaggaatctgaaaggtgcaaggtagcaactgagtttccggaggggctgggaagacgagggcctcgtagttgcttgctttgtttccaagagctttcccagaacaagtagtatgcgcgctctaatctactcacctgtccttaaagtgcccctggagcacccgcggggcacccacggggccataactaccgtttggctgctctgactgtcctttggctttcccttctctccaggagattgatggcaatgccttgttgttgctgaggagcgacatgatcatgaagtacctgggactgaagctgggacccgcactgaaactctgctatcacattgacaagctaaagcaagctaaattctaaagagttggaaacaaagccccacatctccaggttacttctgccagaccagcatccggccaacatcatgagtagactgtcctcttaaacgtcgcagccacaacgactgtgtcttcttatagaacgtgtgcatccttgccttttctaatattcctagtggcccctttcagacactcaaccgtgtgctagacttgtcagaaaaatcacaaaaaggctattacagtgttcctgacgtgctggtcactctttacgggtgctatttgtgccgcgacagagtggataactgaatgctgtcacacaaggagagccctggagggggctcacaaagtccctgcaggggctgtggggacgcccccagtggcggtggcaactgctccctgttcttgggaccgatcagcatgagtttccctggactcagccctggaagttgtcttctgatgaccacctcgccttgcactatctggaaaacttgaatttttgttgctgtttttttgtccgtttgtttgtttttgtttttgttttccgctctcgaagagaaaagggaaaggatgttttggagccctagctactgaagtccttccttgctccactagagggcagactgctaacgaggtttcgggatgcacagactgcgtggccggggtagggtttttataagcaagacctcgcttgcacagggacagggaatgaagtccacattgagcaccccagattgccacttgggaagaaatcaggctctgtcaggcggggtccagctcatatccattacttactgacttactcggtacaaattccgaagcagccatctgcctaaacaaagactggtgtcccttctctcccagagtctcactgaggctctgatatgacggcatgctgaagaatcttggtgacatttagctatgggtatttcttgaaaaaaaggcggggggcgggaactgtctcgacaaagtttgaaataggacatactgatttctagtttcatggctgcgttcttagctgtgtgtctgtggctaatttttctagtcttcaacaaatacgcagacgtgtttttattgggtttaattcaatttacaaataggtttttactcttcactgtgaagtaatgggaaaaaattgattttctaccctttgcagctgtgtccagagaggggggtggagccagggtttcctaggcagaagggtgacctctttactgcctattctttatggaatccctccccctttgtttattctcgatgaatagagaactcatgggcacagccttttccttaaaggcacatctggggaaggtgagggtcaaggataacctagggtctcccttgacaatagtatgaattttagaaaggcaccttccctcaggctgcagtctgagcaagatctcagctggcaagtgtagccagacgtcctggactgtaacaagataaatgcggtctctcagatggatctacctattgtaccaatcaggtagaatttaggtaaagagcacaggacatactccatgctgtgctataagggcccactttgatgttccctgtttgtgggagtgtgacatgaccctgcaagatctttgttacatatacacgggtggttggacttaagtaagacagagaaggagaaaattgtcccagagcttcccactgaatggaacttgatcaggctgtggatgagccggatgtctgttattgctagcatgaggcagaaatgaccttgaattagaccttggagagactctttaagatgataaagcaatgagcggactctgcctagaagaagatttttaactctgggtgctcgctgctgctctgaagttagatccttgtctcagaaagcatcaggcagttcccacatacagaactgcttgtgtgaaagctttgagattagaccggtcacttcacacaaacgtttgcccttccctggaggttcacggtgcctcttccagggacacgggctccttagtgagtggtggtattaagcttgccaaatgtcctgcctaaacttacccatgtctcactggtgccccaagttaaaacaaggccaaacaagtcaggggaggcctctaataatttttgaaggagagctagaacccagttcaagtctgtggaggaacggagctgtgtccccagacatgatgtcttatttcacacgaagccttaaattagctcaattgtagaattccagatatttaaggtttggccaaacaaaacaaaataaaacaaaacaccaagaagcaatctcattagtcttggaatgaggggctgccacatcacagaaggcccagcggaaccaattcttcttgcctgttttttcatagaatctaattagttgaccaaatcagcattgcaatactgcaagtataattaattttcatccctctcaaaaatcttgtcaaacagcgcagctaaatagcttctcaaatgtaaaacatgcaaggccacttcctctaaacagaccttccagggtcagaccgtaagggttaccctggcccagatgagcaggacttgaactcacacctgatagttcacaggcttgctcttccagctgcacagcattgcttcagcttggagtggataatgatcacattttgcataattccaaattaaagagtgtgggtgctcatgttccaaacatttccaattacatttgtctgttaaacacttgggggagggaggtttcaagagagttctgttgcctaaagcattttaaatgttttatgaaacacattattccctttgtgaagattttagataaaagatgtggcctgtgtgtatgagtctgtgtgtgtatttgtgtatctctctctgtgtgtctgtctgtgcctctgtgtgtgtatgtgtctgtttatggggctggagagatgactcagcagttaagagcactgactgcccttccgaaggtcctgagttcaaatcccagcaaccacaccgtgactcacaaccctctgtaatgggatcctatgccctcttctggtgtgtttgaaaacagcctacagtgtgtttgaaaacagctacagtgtacccaaatataataaataaatcttaaggaaaaaaaaaaagagtcgccactttctgaaaccagatcactatgtttataaaaaaaaaaaaaaggatgtctctgtgtgtgtctgtatgtctttctgtgcctgtctataaacctgtgtgtgtgtatttgtgtctgtctgtgtgtgtgtgtctatgcatctccagatactggagttgaaaaatctaagaagtggttgtgaggatagcagctattgcatgttctcaaatatctttccagctttgtagtgcagaggcgcggcatggtctggtgcggcatggtctgttacgtgtaggcatttcctcttattgtagcagggcctgttctgtgcacagctagatgaccagaacagtcctggtgcctagacttgttcctctgaatcagctgagtggaaatgtcaggacctgaggacctggatgccgcaggaaaggccttactggagaggcctcggccaggaacaactgcctaagcgtttcacttatgtctgccagggaggacatgggcctgttatttctcttccacaggattgccaattttttcccctttcagaaataaaagagcagagagaacgcctcagcaaaacctgtgctcagaattgataacttgggaagagatgctgggctgagggtttgagaatcaaaccagatgaacaaaattatacacttcttaggaaaaccgtacaataccgtttgtgcccaccgcccctgcccatgacagccagaacctgatgatgccacagaataattctttaaattaaaatgggtttaaaattaaatgtatattcttttagaagggtttgttgaatctctgaagaaaactagaaacacccaatgttctgttgaacacagtcatcattagaaagtcttgaaggaccttctgatctctccctgagaactattctagagagaggatacctggagagctatcccagtgcataagtaacgggatatgcactcaaaagataacctaccccactttccccagtggaggcaggctcgaactgtttagatcatggataaagacatgttttggttttttgcttttgttttttacataaacacactcagagctgagtccctgctctgcttgtgtgttgccacatgattttgctctgttccatgagaggtccagactgggagcccctgggggaatccagcagatgtccagatgtccagaggcaccaacggtcctgcgtccttccatattgccaagttagcaccagctgcccgggagcccactctgggctctgcagagctagggatgctggagccgcagcccctttgtgtctctccctccaaggcttagttagcctcatcccacaggattccttcacggacaattggaagctgggtttttggaaatctagtatttacttgaaagaggatcactcttatttactgccaccagttaaagattagggcaacatgtctgctaacaatttgctttgtgtaattttgttttaatgctaataagcaacagctgggacacttcctgtggtaacttcctctgtggctacagtacagtcagcacacaagactgcaccaagtgctgcacttacgagcacacactggtctggagacgctgtgctacgcagccagctgtacatttccctaagctgtgcccctggccaacctgctagacttcctacctgagaccttgggcttcttggcacacttaccaagacaccgtttcccaggccagctgccattgggaccaggagttgatactgtgacacaggatggcagaacaggaagatgacaaagaagaagagggcggagaactggcttggcagtgacagaatggcgattcttgatagtgtggggacagcagcatctttctctctaaacatatccatgaaccactcaggcttgctctgtcacctacttgaccacatggcccgcgccacggcgctgaggcagaaaagtagtctaccagtgggtccggcacgggaacgaaccaacaacatgcttcttcaaaccatgaaatgagacatggcgtcattttcctgcagccgtgaactatcaaaggctactttcaccacaaaaggaagcagcctaaaatcgtgtgatgtctctgcctccccacccagggttggaccgccttccctacagtctagcgaagctctctgcttggcttcttcccatcatagggagttccctccctgagcagctggcttatctctctgttgcacaactctggttgtgaaaaagtttacttctcagggagtcacagatgtccgtgaatcagatacaaatattcaaggtgaagtaaattctgaaatttttgtctgtttaatagagtttatccatgcagtagccaaatctacaccacaaacagacattggctagttgatctcaacactcggctccctgtctttgtggtagaagagtagacacatataagagttgtgcccagaggctgcagttaggtttccattgctacaataaacaccatggaagagcaatgttatgggttgaatatgcttggcctattggacgtgacaccattaggaggtgtggccttgtttgagtgggtgtggctttgttggaggaagagtaggggtgggttttgtggtcctatgcccaagttctacccagttaggaaaagacagacccccccccctcctagcctataaaagatagtcctctcctggctgccttcagatctagacatagaactctcggctcctccagcaccatgtctgcctgcacactgccatgtttcctgccatgatgataatggattgaacttcttaaactgtaagccaaaccccaattaaatgttttcttttataagagtagccttggtcacggtgtcttttcacagcagtgaaaccctaacaaaggcaagcaacttggggaagataagcatttggattggttttgcttttcatctgccacatcacagttcatcaccaagggaagtcagggtgggaactcaaactgggcaggaatgtggaggcgggagccaataaagaggaaatgctgtttactggcttgcttttgctggcttactcagcctgctttctcatatagccataggaccacctgcccagggatggcaccacctacaatgggatgggcaatcactgaatttacagcaatcactgaaaagatgcactacacacttgccttcaggccaaattgttgttgagacagagtctcactatgtagccctagctatcctgaaactcactatgtagaccaggctggtctggaattcacagagatcctgcctctgactactgagtgctgggattaaaggcattcgctaccatgcccagctattaattgattgattgattaattaattaattaagttcatgtgtatagatgttttgtctgtccacaagaagaaggcttcaaatcccataggactatagttatagatggttgtgagccaccatatgggtgctggggttgagctcaggagctctgcaagagcaccctgaactctcaactgctgagcgtctctctgacccctctccaggccaatcttatggaagcattttctcagctgagggtcctccttcctaaatgactctagctcgagtcaaattgacataaaactcgtggttttgtttgaataagattgcccccctcctcccgccctgtaggcttatatatttgaatgcttggtcatcagagagtggcactgtttgaaaggactaggaggtatggccttgttaaagtagatgtgaccttgctgaacacccaaactaaagctgggcatgatagcacgcctttaacccagcactcaggaggcagaagcaggagggtctgtatgagttcaagcccaggctggtctacagagtgtgttctaggacagccaaggctacacagagaaaccctgtctcaaaacaacaacaacaaacaacaacaacaacaacccaaagctaggcatcctgtctcagcctcttcctgctgcttgccaacctgggtgtagaactattagctctttctccagcaccatgtctgcctggatgctaccatgcttcttgccatgaagataatggactgaacctctgaaactgtaagccagccccaattaaatgttgtcctttataaaaattgccatggtcatcatgtctcttcacaacaatagaatggtgactaagacaactcaccagcaaggacaccaaacatgtcatagtcttcaaacaccatgagaagattaatgaaaaaaaaatctgtcatctcatcaaaatgctctgttcatgtaagcagagaagttgttcatgcttaggtggtcacgtgctacattaactatgaaaaagacactcagagatggtgaggccctgtatctgtgatgcaggaactgaagatgctttattttgattaaaaacaaacaaataaataagtctataatttataataggaaaggaaacagtctactggagctttttgaaggagcaatgcatcctaccagcaaggcaccttgttgagttgtaaagttccatgtcttcactcatgttagtctgactcttgtgtgtttccttacttggtaagagagtttgagcagtaacggttgttgattcgcttgttgatacaacatccttttcctcatgatgcctcttcaaaaagaatgccagattccttcggggccgagttctccatcctcgcactgatggggaatacccgacacactggaagtaggtagaagataactccacctatccctttctgatcttcactcacctcctccctggagaacagttccagaataataagggctcccctacttctctaactcctggcccatccacacgcatgtaagtagttactggggaaccttaagagtaaaatcatgtgactggattttttgcaaaatcaaaaaactcgagtgtttcgccttcaaagaaatcacttgaaaagcctaggcacatgttccaaggatgctgcattgctcagaatattttttagtacattcctttggagctggtccttaaaaaagacaggccacattctttccaagcattgctgaagcctgttattgtccctcacagcaatgcaaagccactggggcagtgtctgatggtgcaggagggaccaaagcgaggtctgaagttccgtgacttctctcacgttagcctgactctttctcgtgtgtttccttacttggtaagagagtttgaacaacaacagttgttgatttgcttgttgaaatgacatccttttctttatgtttttattttccaattgttggactcgggtagaagcggagaaaactcacctcagagacccaagctaaaaaatgaaagcttttctgtgagcgcagagagtaaccagtttggggtctgaataaacttcatctctgaaggaagattatacaacatgtttataggatggggacataaagtggggaggagcagggcgggctactgcatcgaccaatcatactttgacacaaggggttaagcaaaaaagttaacattggtgactgggttttatccggatcacctggtttcaggaaccatgagtcagcttttgcagacaggtcccctcctggacgctagagtttaggatgataaggggacaaaggaatgggcaagctgcacgaagtccattaagccaagacaggcagcacattcatgacttgtgtgcctcggttgagataatgggagagaggcatcttccctctttccctctggttagcagacaaacgtgagacatctgaagatgcaggacaggagttgggtccctgaactaagttttgttcctaccagcaagatagaacttgttcctgagatggctggactcaagaaaccgtctgctaacacaatttgtagtaggaattctgaaatttttgtgtcttaaaaacaaaacaaaacagaaatattataagaatatgttttgggggctgaagagatggctcagtggtttaagagcactgactgctcttctgaaggtctggagttcaaatcccagcaaccacatggtggctcacaaccatgtgtaacgagatctgacaccctcttctggagtgtctgaagacagctacagtgtacttatatataataaataaatctttaaaagaaaaaaatgaatatgtttttgttttaatcccagatgtgggattaaagcttcaaagcaggtgagcgtgacttgcctcgtgctctagcagaggcatggttttgtcagctgcagatagttcctgcaattgtgtggcatttggaattctgtgaaactttcagagggtgtataaatgctagagagcggggataggtgggactgtggttgttggtttttgggggtgggggtggagtgtcttagttagaatttttcagctgtgagcagatactatgaccgagacaactcttataaggacaacattttattggggctggcttacaggttcagagggtcagtccattatcatcatgggggtgtgggggaggggtcatggcagcctcccgacaggcatggtgcaggaggagctgagagttctacatcttcatctgaagaactgctagcagaatactggcttccaggcagctaggatgagggtcttaaagctcacacccacagtgacacacctactccaatagtgtcactccctgggctaagcatatataaaccatcactggaggtgttggtggtagttgcagtttgttagtagtcttgcccaaaaagagtcagggatctctctctgtctctctgtctctctgtctctctgtctctctgtctctgtctctgtctctctctctcctatctagtgatagagggtgaaacagtggtaagagtgggggataaagggtggaggaggaaagcaccacacagtggctctgaggtacgatgttgagacgtgcgcagtgctaaatagagggctatggtgatacatttcctggcctttcccagcacaatccctatcccagaaatccttctgacataggtgactgtcctgtcttcaatgctgactggacaagagatctcccagaatgctcttggacattagtgtacttccagaagatggtaggaagtggtctgctcgagagaagcaagtcatcgaggtcattggcactcgacctttcagactgaatgggaaggggagaggctgctaagtccttccgatgaagttgtagaactctcagctagtccgatgagcactgcccttctgaggcccggagcagccaatgagtcgtgaggtctttccaggagccaaatttctttctttccaggaactaaatatcattctgttaaagtatgagagagtttggtggacttagatttctttattgtccattctttctcagccacaatatttaattttctgttattgtttaatcttatttttgatttcttaggaattaagagaaaaaaaagacagctcctcttcaagaaaatgtaaaatatcagttacattataaagtaaatatttttcctgtatagatatcggttagttagattattgctctccattccgaacagagaaataattattaatataaaggtttcatactttaactgcatttgtgaataaatttacttttaaattctctatatgtgcaagaaaattaaataaattgattcaatacaatcttttcatcataattatcttctattttttccttttcaccagcagggacaatcttttgttaattaagtgctattgtaacatcacaaagcttcagaaggccataaggtgtgttttactacagcaccaggatgaggctgtcattgtgtgacaagcctcttaaagaacaatgggggagctaggcactgggaaaccagactgcctgagcctgcggtggggttgatgctgattgaaacattatggcttttgttttgtaaactgacaggttcatttgcagattcttcaaactcagcctttgttaatctcctctttattctgcttcattcccgcagcctacttgggaaactgtgatctcaccctacctgggagatggctgctgctcccttcccttgctgcctcttccttcctttgctgaactgcaggaag

SEQ ID NO: 2544 - DNA, 2180 bp, Mus musculus
atgctggcgggtgtgctgtggtacattgtatggctccttctctttgggctggcggcacaacagcatagttttgggaaggaagattttggaaacctgcattccccctcccccatttccaaagtatctggacctgttattgaagtaagactggcaccagcagagatgcagacacagagggtgccagggaggaaacgtggccggcctccacttcactccacacgggtgcagatggccgtccataacctctattctgcttctgctgcctctgtgccagcagtgacaatcccaaagaagagaggacggaagcccaggtacaagatcaagtctccagtgctcatgactcccttggccctgtcacctccacggagtaccccggaacccgatctcagctccatccctcaggatgcagccaccattcccagcctggtggtcccagaggctctcacagtctctgcttccttcgatggaaagcagcacttgaggagtctgcctgtggtgaacagtgtgggctatgtcctccgtttcctgaccaaactgtgccgcagcctcctgtgtgacaacctcttcagccacctgccttttcccgggagcatcggcgcctctgacaaggcgcaggagagagaggatgggaggactgagtcagccaaggtagccacggctgaagagtgtctggcaaacgcagtgggcatgaaccgctacgccatggactttagccacaggggctccgtaacccactcttcctcactgtacaagaggctgacctgcggagacagccaccttgccggaggccccgccaccaccaccagtggttcccgcaccaaccctgttccctctggaggttcgtcgtcacctggactgaggctgccagcctccagccccaagaggaatggaacagccatcgaaggaaacagatgtgccccgagcccctctccggaggtgcaggataccaggcgaccaagcagcagaaacccttctacctggaccgtggaggacgtggtccggtttgtgaaagatgctgatcccgaggctctgggacctcatgtggagctcttcagaaagcacgagattgatggcaatgccttgttgttgctgaggagcgacatgatcatgaagtacctgggactgaagctgggacccgcactgaaactctgctatcacattgacaagctaaagcaagctaaattctaaagagttggaaacaaagccccacatctccaggttacttctgccagaccagcatccggccaacatcatgagtagactgtcctcttaaacgtcgcagccacaacgactgtgtcttcttatagaacgtgtgcatccttgccttttctaatattcctagtggcccctttcagacactcaaccgtgtgctagacttgtcagaaaaatcacaaaaaggctattacagtgttcctgacgtgctggtcactctttacgggtgctatttgtgccgcgacagagtggataactgaatgctgtcacacaaggagagccctggagggggctcacaaagtccctgcaggggctgtggggacgcccccagtggcggtggcaactgctccctgttcttgggaccgatcagcatgagtttccctggactcagccctggaagttgtcttctgatgaccacctcgccttgcactatctggaaaacttgaatttttgttgctgtttttttgtccgtttgtttgtttttgtttttgttttccgctctcgaagagaaaagggaaaggatgttttggagccctagctactgaagtccttccttgctccactagagggcagactgctaacgaggtttcgggatgcacagactgcgtggccggggtagggtttttataagcaagacctcgcttgcacagggacagggaatgaagtccacattgagcaccccagattgccacttgggaagaaatcaggctctgtcaggcggggtccagctcatatccattacttactgacttactcggtacaaattccgaagcagccatctgcctaaacaaagactggtgtcccttctctcccagagtctcactgaggctctgatatgacggcatgctgaagaatcttggtgacatttagctatgggtatttcttgaaaaaaaggcggggggcgggaactgtctcgacaaagtttgaaataggacatactgatttctagtttcatggctgcgttctta

SEQ ID NO: 2545 - protein, 393 aa, Mus musculus
MLAGVLWYIVWLLLFGLAAQQHSFGKEDFGNLHSPSPISKVSGPVIEVRLAPAEMQTQRVPGRKRGRPPLHSTRVQMAVHNKASAASVPAVTIPKKRGRKPRYKIKSPVLMTPLALSPPRSTPEPDLSSIPQDAATIPSLVVPEALTVSASFDGKQHLRSLPVVNSVGYVLRFLTKLCRSLLCDNLFSHLPFPGSIGASDKAQEREDGRTESAKVATAEECLANAVGMNRYAMDFSHRGSVTHSSSLYKRLTCGDSHLAGGPATTTSGSRTNPVPSGGSSSPGLRLPASSPKRNGTAIEGNRCAPSPSPEVQDTRRPSSRNPSTWTVEDVVRFVKDADPEALGPHVELFRKHEIDGNALLLLRSDMIMKYLGLKLGPALKLCYHIDKLKQAKF

SEQ ID NO: 2546 - DNA, 137933 bp, Homo sapiens
tcagagtaaaccttcattccgtcagggttaaggggctgtcaccagcagcacagggttggggaggagatccagtcttgtttttagtcctcccaacttctgcttttggggattcctgggacttccagtttaagagactttctgggttctatggggtgaactgtgtgctttctgggaacccccacttgaaaaaaggcccagtttcttcggtctgccaggtcagttacctcttgctcatccactttgcagcttctacaattttgttgcttttattcccgtttccttccatttgtcacagtgtatttatgccacttaaattcccttttccttattatgacacctcatatatgtgccaggcactattccaacaactttacatcatattcagcctaactcatttaacccacacaccagtcttagcatccctgtttcaggcataaggagctgaagcacaacggggttgagcttctggaccgaggtcatggacatggtcaagccagaatccctgcactgagccagtgagcttgccatccaacttgtacatttcttgtaaaaaatttttttctaatttttaggttttgctattcacattccttttagtatgaatatcatattaatataactctgagctgggccctttctcacaaactgggggaagcctggacttcctctccggagagtcctccaaactctctgggtttcatacttagtccaaaggggtctttgctggttttggtcactggtaggtcagtccaaggatccattcccagatggtgttgccacgtcctgttactgctgaaaggaagcagtccagacactcttcaggtgtctcctgagctcctcagccttgcagaacccactcaccagctcctccagctaccccatggctaggtccccagtgcttgcctgcagcctccacagggttcaagcggagagaacggaccctcctaccaatttcctgattcaggtaaggcccggctcttaacccctacccaacaacacacacagcgcggacttagagccagataaggtggtctgagtagtacacagcacttcttttaaagactaagttattcaatcttaaacaacgcatcttgagaatgtcaatatccagtcaagccttcctttctagaaggtcactccccttgtaagaaagaatggaattcagctaactatatgaccaacttacagggctgcagcccctttgtcagatagccagctttctgcctcttatatcccaatattcgcatcccagttaagtccagccattaagtcctccccgcatagtggcctccttccctagactcactttcataatctttttggtcctggcccctggcttgtcatatgctaatgtggtttcacctgcatcaacccaggatgcaaaactcagtctcttcatgagtttctgcaagaaattcaaccacagcaagcatttcctaatttctgtggctcttcctgaagattggtatctgagagggcaggaggtcacatgtgcggcgcgcagcaccctatcctctaccgctccctacggcctctcttcttcctggtctcctctgccccaccttctactagtcagttgcttcttgctgattttggcctttagcaccaattcctcttcccttttgcttagtaagagccctgcaattgtcattcaggtgtacatttctccccaggcagctccagtgcctggcggaaagcagagggtccccaccagtttcaaaggtgaaattaagccagtcagcatatccgggtggcagtctttggttcaggaatgggatgtggcccaattccagccaaggagatggagggatgttagccagaagttctaggaaagaagcttccttgctcctctgtggaagttacctggagaggctctcccttgtgctgggtgggaaagggggaagcatgtggcctggaagcagctggcaacagaactgtgaccatgagggaagccaggcgtaagatgattcagaccagatctttggtgacgttattgaccaactgttgggtcacccttgcctaagctcattggactccctgctaatgaatgccctttatttttatttttattgtttgagacagagtctttctctgtagcccaggcaggagtgcagtggcatgatctctgctcactgcaacctctgcctcccttgttcaaacgattctcgtgcctcagcctcccgagtagctgggactaccggcatgcaccaccaccccgggctaatttttctttctttctttttttttttttgagacagagtctccctctgttgcccaggctggagtgcagtggctcgatctcggctcactgcaagctccacctcccgggttcacgccattctcctgcctcagcctcccgagtagctaggactacaggcatgcgccaccatgcccagctaattttgtgtgtgtgtgtgtattttttagtagagacgggtttcaccgtgttagccaggatggtctcgatctcctgaccttgtgatcctcccacttcggcctcccaaaatgctgggattagagacgtgagccacctcgcctggactaatttttctatttttagtagagatgggttttgccactttgaccaggatggtctcgaactcctgactgcaagtaatctgcccgctttggcctcccacagtgctgggaccacaggcatgagccactcactgcacccttcatttttaaagccagtttgagctgtttttactgttacttgcaaacttacttccctcttctttcctcctctattctccagtcccagtctctaggttcacttgtagctcatgtgggtttatcatagatatggtccacactgaagttggctgtccttaagatgaactgatcaatcagttgctttttattcaccaacgagctgggtttttttttttttttttttttttggagaatgaaaatttcagactgcatcatctctattcagattcaagttttgttctaaaggcaatggttgtattcttgcttttttgttactaagaaacccatcttggagatcttccctcaaataaagggagatggaacctcaggtgatcaacatctttattctagaaactgcaggcaatcccccaaaactatcttctacatgaactttaaaaaatgtagagtctctctttgacgggcctctgtgtccccctcccctcatctcttccttttccccgttacaccactttcatagaaattgagcccagaagcagtaactgttttcagctgaaattgcaggtattcattactttatttgaagtctgttattctggctctttggcgcacacatagaggtttgactgagactcacatttgctaattctagaagcttctcagtactccaggcagagtactgagggtacactgggtttgtttctcctatctaacttgggggaaatattgtaggtgggaaagagaaacctagtgcttggagatcacccatttgaattaaagctcatttgttacaaagaaatacaactcaaagcagaagcgatcacaaagagatgacattttaatagaataaaggaacaaaaagtaaagggaagtcttcctttgaattttaatgaatgatttttttttctgataacagacatctgacaccaatcacttctgtgggagaaaggaatcagttctaaaagcctgtactaacatagattaagatgagatctcccactttaacttctagtttctttcattcattcagtaataattatttgttaatttcctactacggcctaggctctgcactacatactggggttatagtggagaagacctattccctgccatcttggaattaacagcctagtgaccaaagaaaagtccctgatgttgtccctctcagttcttccagctgtcagtcacctgccctcacccatccaaccccttaccagacgctgcccctgggataagggtctctgggctgtgcttccaccaaaactgccagaccttgagaaaaatgtttccactcagtcagtccttgagtatcagccagggtcacaggcccagagccacaaagagagaaggccctgtctgagaggagccatgttttgggcccaagagaatttgagtgagtcgtttttccttggatgagagtgttttttacttgattcaatcaccaacttcctatgtctttagcacatggcttgactaaaaacaagacagagtattatcagctctgagaggaccctgctgacttcagaggcccttgggtggggaaggatagggaatatgtccctaatttttgtattggctgcactaagcaccccacatgggctccagaaatattcgtgatagtgaagcccatcatggaggatgtgggagcaggctttggactcagggcactggctaaggcaggggctgaatgtaacctatagccactgggctgacaaagcttttagttttattttaatgatgaaatttgagacttaacatttatgagagccattatcaaatatgtttgccaatgtgacgaggaaaaattctgttactaatcaatcaattaattcataccagtttttttaatagaaccaatatttatttatttatttgtttgtttatttattttactttaagctctgggatacatgtgcagaacgtgcaggtttgttacataggtatacatgtgccatggtggtttgctgcacctatcaacctgtcatctaggttttaagccccgcacgcattaggtatttgtcctaatgttctcccttctcttgctccccacccctcgacaggccctggtgtgtgatgttccccctgtgtctgtgtgttcttattgttcaactcccacttatgagaattcacaccaattttgattatcacaaaagaaatgggtgttcttgggcagaacatataaaggaaaaatattaagataaaaattctatcaccaaggaatcattactattttttcttttctttttttttttgaggcaggatcttgctctgtcacacaaactggagtgcagtggcaccatcgcagctcactgcagcctcgccctccccactgctcaagcattcctcccacctcagcctaccgagtggctgggactacaggcacgcaccaccatgcctggttaatttttttctttctaattttttgtagagacaaggtctcccatgttgcccgggctggtcttgaactcctggactcaagcgattctctcagtgcagcctcccaaagtgctgggaagaatcattactagtaacatgtcttatattttgtaaatcattagttttttttcaaaataaaattcgatcctggatattattttgtaaattgcaatattttcgcaaacatttattaagaacattttaaaagtttcattccgtgttcttctatgacaacctttttggggtgctttgtgtattctgtgatttaggttgttttttgtttatcttcactacacagaacggttttgtctttaactttaaaagatccctgcttgagtagttgaagctaagatctggccccatgaaaggcaggcctttgggttgaagaagcgacagactggggagtcaagagatctggcacccactcttgtgtagtctgactaattaggttaactatttgctgcaaaatggtaatcataagccttatgctttccatagcccctaaggttctcaaacttgtgttgaatgatgtggaagggaagctgtggggcctctggagtgtgggaggctgttctcccttccttactacagaaatggaatcttagcttttcttcgtgttctttctccatgctctctcctccctacctttgctccaaattgatatccaaagctctagtttactaggtcttatcctaatgagagaaaggacactttttgcccctttgtaattatggccatatccataatcacaactaagcactcctccaacccaaagcgtcatcctgtttcagcagaccgatgttttgagttagagataaagcagttcttaggcttgtgaaatgtcagagccataagtgaccacaaagatgatctagtcccttatttccttgtcccgtgttatagaaagtcaatgatttcacccatgtcattgggttagtggtagggctggaacaagtggcagtgccaggatccatgaggtggaatgattaattagagtatctttgggcacagactgcctgggtcagacctgtgtctaccacttctaagctgtgtgtccttgggcaagttatttaacatccctaagtctcagtttccttatctgtaagatgggaatggtatcataatacctacttcataggattgtcataaatgggatacaaaatgggaagggcttcacacataattcttcagtaaatgttagctatcactgttataacaaaggttgtttcggcggtagcactgactgccagtccaagacagaatcctctcgatcggatgcttgtgttggaaaacacaactctttaggacaaaggccattttcaatgtgaacggtgtctttaccagcagctgacagaaggattactcttcaaatggaggctactctaagtagatttgcatttgggacgcccccaaattaacttgctccctctggttgcctcctgctaaccaccagcccagtagcactcgtgtggagagagtggaacatgctgcttgtggtctgagacagaaatgtaaccacagtgcaaagaaaattaacaacgtggcacaacctaagcacccttttcatgggacagggatgtacaagacttagagagatgctagctcagagcggtcacttttcttcttagcaggtccctcagctaataccagtcatcccatcaaatttcttttttcttacatgtttaacttaaatttttcttggaattaaaaacatttaggattttttaaaatattgatttaagttattaaaagctatgttcctggttgcatgaagaaagaaatcccagtaagtttaaatatatatattttaataaatgtgtgtatatacagatatatttaaataaaaaaatttaagtaaaaaatataaagatatatttaaataaaaatatacatttaagtaaaaaacaaatatatatttaaataaaaatgtaaatatatatttaaataaaaatgtaaatatatttaaataaaaatataaagatatatttaaataaatatatttacatatttattaaatttattaaattacataatttaatgaataatttattaaatatcaaatattttgaataacatatttaagtaaataaatattgtttacttaaatatatacatatatataaaaaatatatatattttttgagacggagtctcgctctgtcgcccaggctgtagtgcagtggcgtgatctcggctcactgcaagctccgcctcccgggttcacaccattctcctgcctcagcctcccaagtagctgggactacaggcgcctgccaccactcccagctaattttttgtatttttagtagagacggggtttcaccgtgttagccaggatggtctcgatctcctgaccttgtgatctgcccacctcagcctcccaaagtgctgggattacaggcgtgagccaccgcgcccaagcaatccagcttttgttgatttcaattttaggctttattaccaagttgacctgttagatgacaatgggtgcttcccacatgcacccaccttgaggacaaggacaacagtagcccatctgggaggaggcaaggaggttgggcctgaggatcagagtgagaaaccctcacagagctgggtaggaaaaccagcaactcctttcttatgggtagattctgccaacccttttacttcttttacaggacttggagattatttctgattacttaagaaatgttattttttttaatcctaagaaacattttagagtgaaaattggtctaatgtctcagcccattccaggtgctttaagctcagtgtagtgtggcatgtgtgaggccacgggtgtgagtataataaccgctgtcgctgggacagagatgctgtccaaacttaaatcatccatcttctttccttttctttccttttcttttcttctttttcttttctttcttttcttttcttttcttcttttctttttctttcttttttctttttttttgagatggaatttcactcttgtcacccaagctggagtgcaatggcgtgatctcagctcactgcaacctctccctcccaggttcaagcgattctcctgcctcagcctcccgagtagctgggattacaggcaagcgccaccaagcctggctaatttttgtatttttagtagagatggggtttcaccatgttggccagtctggtctcgaactcctaacctcaagtccaggagtcccaaaatgctgggattacaggcatgagccaccacacctagcccatccatcttattttcttttttttttttttttttttgagatggagtctcgctctgtcacccaggctggagtgcagtggcacggtatcggctcactgtgagctccgcctcccgggttcacgccattctccctcctcagcctcccaagtagctgggactacaggcgcccgccaccacgcccagctaattttttgtatttttagtagagacggggtttcaccattcacaggatggtctcgatctcctgacctcgtgatccacccgccttggcctcccaaagtgctgggattacaggcatgagccactgcacctggcccatccatcttattttcttttcttctcctcttcctccttctttagtgaaatcaacttatatgaaatgaaaatgcaaactaccaaacctgccttttcccatacaaaacaacaaaatttgatgattaaatgaactaaagtagtgaatttcttcttgctcaattaattacaaggctttgacttaaaacaattttttatattttcataataaatttcagaggagagatttcttatgtacttctaatgtgactctacacatatatttagagaaacctcaagttgtccattgcagtttttttcactctcagtaactggccaggttgtggcctaagccttcgttagccctggttgatatttagtcccggctaaatttgtttgctgctcatccctaggagtaagccacatgtttgtagaatggatgtttcatcttgtaggaaatacctgtgaatatgccaatatcccagagtggatgaaatgggcaatggggagccctgctccactttacaaaaagaaaggaaaagaaaagatcccttcgccgatatatattgatttgctgcagaaaatgcaatggggcatgggaatgaatagtcactcttgccctgtttctatcctgtgcaggtcccaccacgttgaggtgggtagagatgcttacacacacacacatacaggcctggagccaaagtcagggccggctttaatgaactgtacacatatgttgtgggcagccgctgatttaatatgtacaaccatggtgtgtgcacacacctggataggcacactgctctgggaatcacacagggtctcctgaacaatgatgctattgtaatatttctttttgttttatttgtccaaagtcaaacattcactctgtcagatcaccagtgtcttataagcctggtgttggcccacactgctgcaggattgggacaaagagacgatgttacagtctggtttctatggcaacagaggaggggtaatgaaaactgaaatgttggaaacacccattctaaccattgtgacataattcaggttattacaaggatgtaactaccaaagaagcagaagtgtcattaccttgcagctcatgtcgacaaaaagctacactgcacatttctcttaggctgctaagaggaaggaaacacaaaacacacacacacacacacacacacacacacacacacacacacacacacacacacagaggcctcgttttctgcatgtaaaatgtgtgtgttctttaaaagccagtggttggctggttttccggacatgatgtggttgaagctgtcatcgtaatggaaattcattgctgtagctatggtaaatcgagttttctgcctgtgctgaatgcattagtctaatgagatgtttgcagctggagcgcagggctgctggagactaactgtgagctactaacacgggtggaagatagcttttgcaatactcggtttgcatgtgctgaaagtcatctgtcttctgagtcaacactcccgacctggtaaacaacctgctcagggctctggtgaacaagctgtaggtaagggagatgcacaattggaggcgtgccgttgacacgggatctttctcttgtaactgtcagcatgacaggttacctgtttcagttttttctgggttgcatgcctacctctatggcaacgcacaagagtgtcctgcactaaaaccactgagtccagtaggtaaactttagttcctcatatgcaaagtacagcatttaatttattaaccagatctcagaggggaaaatgtaacattgaattatatagtttataaatttgggctatatacatgttcattactctttaactctgcatttaaatacctagaaagttatttttttccaaatgtgaactcaagtaaccggttagttattttttcccttcacgataattttgctttgttttgctttttaattttaaaaaaattgtactatgtcttgggataaaaatatttacctaaaatttggttattaaaattggtatgttatgaacatgtaaaagtgttttttttcccatttaattttatttcaaatatcccaggtagaatatttcacatgtctttgtgctggtttttcctaatttatgaggcataaataagaataatatttactgctagtttctggttttaattcgttttttgggaaaaaaactggtgactatggagtattagcggcagttttcccaagctcaaaatcacctccttcccaggtggagcactgtgacttgaaccagcttccacgtgctcctcccaaagcatgaggggtcctctccaggttgattgctggctggacaggagcggtggatgaggccagggtgcaggctgctgagctgttttgctgagttgaggtgcttgagtcaaagttctttccactatctgtgatcgtgaacgagaggtgtctcctcgtgttgtctctagattccatgacggtactcatgagggttagacaatcagtggctttctgagaaagtggttttttactgatctcagacactacagtacttgagaaagtaatccaggcacttcagaatcagggtatttgttatatgctgtttttctttcttttcaaccagaggaaccatttttgaagaatgagggatatagctgctttttttctccacttttttttttttaaagcaaaatagaatatctggagtgaaagcataaaaataactacaaaggaattcttagtgtgttaaactatctggggggtataatatttgtgtggagcattttttgtgttgcttggtagaactagtctgataaaatgaggggctgtttgagcaacagcagctgggtgaagattacctagaaaatcggtactgcgtgatcgtctaaactcaaaaggttaatgtagaatcttcagttttagggaaattggtggcttcacaaactataacttttaaacaggctttttgacagaatttttaaaaaatatgaatgtgttttctttagctctttaaattgtgtacgtagatgagctctgaaatattttggtaaattcatcagtttgcttcatttgtggaattataacaaaagtgcaaagcccacaaaaatccagttctttcatgtataacatgtttacatttcttccctgtgtccccaaaattacttttattttgctgcaaaaaaaaaaaaagaaaagaaaaaaagaaaagagtaaatgaacggtaatagaaagacaagaaaacaataagcgaaacgagtaagttgcttttcatcatttctttgcttttggtggtgtgttttcgaggcgagggaaatcagcagaagcagtttcactttctggttcttgactcctgggggtgagggtgaaaggctgtctcctctagcaagcagcaggtaagctaagcagctcagcccacagaaaacaagccagacccaaatactgtcacttgctgcaagaacttttataatgagagttcaaaacaatattgactttaaaaaaatactcagtaacactttcctattaaaaaattcaagcactaccccaaagtacaaagatagacttttttaatttttaaaatttgaaatgatgagaaaatcatctctgctgtttatgtatttttaatctcaattttggatctcaaatacttcaatacttttaaggaaacataactgaagttccctgaaatcataacaaggaatgctcggagaggaataacctttctgggagtctgggggcttaaatgttagagtgcttcgtaggtctgtttacaattttgtgtggcctgaggacacatcacacatgtgtccacacatcctttatgacacgcaccttaaagaacttttggtccaggcagaggtggtggctggagcttgaaagccctcacaggggccctgttagggatctgcaggacaattttcctccccaagtccctgccctcggaaacctcaatatcacatgggtagatgccagggagccgggatgtgcccatcccactccacaagtcctgaagagcgtggcaggtgacactacccctcattgggctgggagccttaggataccaagcatctccagtgtcattcttcccctgagccctcagattttatgtggggatggaatgggaaagaagggaaaggagatgagaaaagaccctcttttaatctgattatcatggagcgtaaaatcttgtctaacattttgtggatgaagtttgtgaaagcagttgcctttggtgtgatcacacaagcttctttcttttggtgggcacatctgatgtttctaagaaggaacttttaaacaatgcctccctagacatcttatttcttaattctgccatctctcaaaaggctagttttagatttacacattttttaatgttttcattgccttcaaaagcagacaggtgaggagagaagagggggattaaatcagcccctgggagagacattaaacggcttggtacagatatcatataacagaagccaccagggtatctagtaaattactctaaattttaattaatgagtcacaaaagccacaccacaagctttaaaaattacccttttatcaataaggtgataattaactttctctggaattagcagttctctcagccccggggcagtacacagcctagtaagttctctggaatgctgccaatttttaacaattggtcttttggcaaacctactggattttaattcaaacatctattgtgacattttccaacgtggtccacagaccattaggatcacccaaatcgtggtaaaatttctgaggtcaaaagagcagcttggaatgtttgaatcgcatttgaatatgtcactttctccttcttcttcttttttttcttttctacctttccccaccccaaacttctgcatttgcaagagcgcagtgctccagtctgctgtaaatctctactagagtctctgctgtaaatcgctgtggggaaccctgcatttgttgatacgcccataccaagtccgaacgccctggctgccagcccgtgggttctaagcgtttttcattgttgcactcgtcttggtttcaattctggcaagggctcactccttcatgtttttgcaaactctcacccgtggtttgtcaaatgctgatctttagtttgagacttgaagaagtgctttgggcaagagggccattttggacatgcttacagaggcttggaatttagcttcttctgatctgcatatattaatgtctgaagaggcacagacaggagcattcagcattgcagagcagcctgccccacaacagcccttctcagacatgcatacgcacacgcacacacaaacacacacccctcccagtgcggctggtcactggtgggtggcattcagggacagcctcaggagggacactgctatttgggtatagcatctggagggcaagtggtgatggatgcagatcatcccttcaaaagtcagcctcctctcttccctctggatctttcaaatgttagcattgctgggctcctgcttctctcagccaagagacgtggccagggctgaataccggtgacaaggcttcctgctgggttaagcaggcagttctgacacagacaagaacatccctgccttcaggcggatggggtggagaccagcagcaagctgcaattgtgcattctggaataaatcagcacttagcaatcaggagaagccctttgctgccgcggaggagataaaacacctcttacttcttgggatgattatttcttgggctactattttaggacagaaaggaatttattacccagtggcagttctcactttgcattaagctgaaaagtcattccactcagtccatttgacactctgaagtaatgggagtagattttgatatccacattgcatatttcccggggtgactattactataccagttttactagttgtgttttagtccagtgataagaaaccatataaactcctcttactctgccactaacttagacacatgctacctaaattttcatttgtggggaggcagatgtgcttttttttttttttttttggcagttgcattttttgatcagataaatgcaacccaccattgctgattttcaagaatgattgcacattcctgcagccaggctgtcttagccttttgagaaattggctgggctgaggaggtcttactttctccagaaaacatgcaagacagaagcagaggagtggagcaggctgttatgagaaaattagtatgccaggaaaaaatagtgtcaacactgtgctttgaaaggtggtgatgttgtctgcttagccccgcgatggtgactcaactttggggagctgaatatttggtaaccaaagcccttgcccttttcctctccctgtgctgatcattatagagaagccctcattgtttcaaaacagaaacatatggcctgaaagtaatcctaaagacatgtgcaggctcccataaagatgaatactcaacttggctgggtctaaatccagccaggggaaagtggtatggagcaaagaggcagtaggataaaacaaagagaagggagcctgttccttctcccttccaaccgagcactagaccttcactctccctcttgtacccccggtgcagttcagaaaggattcagtaatagctatgagtaccatacagctgtcagctcatagaccataggggccttttcttttgaactgaagaaaatattttctcttctcccgtcctcttttgtccacaggtcatcctgggacatcattgctctgatgagaaaaccagggttgaacactaaggagtatgtttttccctggtgtctagagccagggcctgcccctctcaccaggcccatgaaacacttggagctgccatgtctaaggccctgccttagatgcagacttcaagtcggccaggggctggcctcaggattttaatcctgttttgacaagcagtctgccttggtgaatgaggaaaggaagaaccgaagagaaaaacacaaggcgaaagcctattccagggcattcatgcttttggttttggagacaggatttggaggtcatgtaacttaattcctttgggcctaaccatttctgagtgattataggactgtaagaatcattctcattctttgtggccttccaaagaagaggctgacctctttccttcacagttctttaggatttagtgccctcattattgggaaattttggtgatgtcaaggctttatcaaacaattagctattaagacatgctgttgattccaaagagaataatcacaaatgttgcacaatgcattgggtttattgatcagtaatgaattccactgggggaatagatttctgttattttttcagtcgtgaggaatctgtggtcatttgttggattcaagcaagatttggttcatgctgttgccactgtggcctgtgctgggggagtttgccttgagacttaggagtcaacccagcagccatctgcgcactgccccttttattgggaattttccctttcggatgccaaaggtgcccgagcatattcgactatatcacttttaagacctcatttgcaaaaaaacttcaagtggaaagctgtagatagctttaaattttggtatgcaaattacaaagcatagaaacagtggggggaagaagctggttctaatgctcgaaatcaccacccacggtgtgaaaatatagctcttgttttgagtgtcttaacataattagtactagagacttaacataaataaagagggcaaacagcatggtggggttgtgttggtgcctgatgtggaaatggttaattggtcccacagtgagaaactgtacaaccgtgtgttgctttaatgagaccaggtgagtataagctctctccagggatgtgaagttagtactcgatttgggaggtgatatgtgtgagaatgtgtgggggccaatgatatgatggtatagaggattggttctttctttctagggccctctcttttagttagaagtcatttggcatgaacccagtaaagaagaataaattaactaaaagtgatctgatagtagaataagaaaaaagtacattcagtgattttttttttttttttttttttttttttgagatgaagtcttcctctgtcgcccaggctggagtacagtggtgcgatctcagctcacggcagcctctgcctcccaggttcaagagattttcctgcctcaagtagattcccaagaagctgggattacaggcacctgccaccacgcctagataatttttgtatttttagtagagacagggtttcaccatgttgcccaggctggtctcaagctcctgacgttaggtgatctgcccaccttggcctcccaaagtgctgggattaaggcgtgagccattgcacctggcctagaaaaaggtacattcagaaaggtttgtctaatatgcatttccctggaagcagcccaaatctctgttcaggtcaaatgctgagaaattgagttcttattcattggcttgggaccacggtagtgtgagattaactggaagtataattgtttagaaatcatatttctgggtacaggctaggtcattgtttttatgactatatttgacatttccatgcctgaagaaaaaaaaaattccattggaccaaagacccagctggtccctgtaaatttttaacagcagataacacaggttacggaacttccaggacaaagttaagaaaacccaggccacgctttggcagagatttcctgtgttctgtgtgtgtactttgtgaatcgaacatcagtttcaggggttttctttctcatccctgagagtgcagatttaaaacagagtaaggagaatttatgctgaaaccatggtgccactgaagtcccagaccattttccagctagctcactcatctgtggaaaagttaaaatgacaactgaaacaatatgtttgaaggaaaaacatctaacattcaaggaaagagttaaaagcaaaaacctgtactctgagaagtgatctcgaagtgaagcctggattcttagactgaatgggtttcaaggcctctctcccaggtcaaggcccaaattccctgctaacgtcttggaaggaggcagacagcacaggactctatccttccattgttagcaagctccagttgttagcagtttcctacctttcttctccagtagcttcttcctcctctgagagcctacttgtgtcttcagagctgcacagaatccatctaaatggaaccgcacggattccagttcagaaaagccattttcatggccaccagtgtgacctagggcaagtatcatggcatccccgagcctcctctcctccctggagatgttcttcctgtcagtccccactgctgaatggttcaaaggaaacagtatgtggaaaagggctttgtaaaccataaatgctgtatggatgataatacacatttgcatcaattgagcattatgtgctcagggatgtggagggaagcatgaaacatggtttatcttacttatcgtgtttgatccacacaggaagtcaatacaggaggggctacttttaccgccaacatacaaatggggaaactgaggcttatattatacataactaacttattgagggccacatggccctaggagtctgtgagtctttcctcctttggtttgagcagtggccggggcgtccgtgtcttttcacctgtgagggctgaagagaaagagctctttcatgctgtagcgccagcctctcctgctctgcctggcagggctgctgcaggtccggcaggttccagaaaggaaatgattccctggtgtttccacttcgaaaggcatttttgatccatagaaaatttcttttaaagcagtaagcttttaggcctgtcagacccaacccccatttttattgcaaatatattcaagcacctggtttacaattctgaggtgaaattcctggataatatgactcactcacacccataatttttaagaaaaattaatataatgtcataactgaaatataaagaagaatgagacaaagtatttgctgattacttccaacgcaggcacccgcctctgggcaacagaacgaagtgatcaggggctgacacctgccccaagaagctcaggttgggccacccctccaatgcagttgaagtcagaggagtgggattggtgactcagataacatgagctgctgcgggtggtgtgattttccaaaatgatacacaactcttggaattctgaagaaaataaacagtcttcctttgatttatgcactaatggcattcctggaaaataaagtgtaaagtgtctattacagctgagcagaaatacatattgcttttttgtaaaataagttagtcccaggttcagaaaagccgggtatttctatatggcaagacaatgctttcattgtgtgggactgctccatccactgagggacacccagcatccctggtctctgccctctaagtggcaggaatgcccactctgcccccagcattgtatcagatacaaccatcactgacacatttccaaaatgcccctctgcagaagctgttaccatcactgttgagcacctgtggatcagagctgccagtcattttaccttctcctgcctccccgaacactctgattaattaaggcttagaaaaaagatggttctgttttgccagtttcctacatgatcactatgcagagccctctcaaagatcatggtaggaactttggggtgcccttaacattctaggaagatgcttgctagtgaatttcttctgaaaactgtagttttaagctaaatgagaagaccctttctatcatgtgtcagtctccttcagattatgcataggtttttatcacatatatggtattttagaaagcacctttgtacggcctggcacggtggctcacgctcgtaatcccagcactttgggaggccgaaggcggtggatcacttgaggccaagagctcgagaccagcctggccaatgtggcgaaaccccgtctctactaaaaatacaaaaattagccgagtgtggtggcacacacctgtaatcccagctacttgggaggctgaggcatgagaatctcttgaacctgggaggtgaaggttgcagtgggccaagattgtgccactgcactccagcctgggtgacagagtaagatcctgtcttaaaaacaaacaaacaaacaaaaaaacatgtttgtaaaatcctcactcttctgtaggttggcttaaaatgattaacactactgagggactgtgatgttgcagacattgtgggtatccacacagcagcccagaaacatcaccattccatgtcacaggccaaaaggcagagattcagtgagcttaaacaactgtaccaagatcacctgttaagtggtataactgggtctcaaattcaggtgtgtctgactctaaaactcacaccttttttccagtctgacctgccacttgaattaagtggctccacggttaacttttttatccatgatgttgaaaccccattctgaggactttctccttgttcaatacgtaagaacgaggtaagggaataaagatggctacaaattctttgacattccttccatggagatgtggggtctaactcccctctccttgactggcatgtgttgcttggctcttaggattggtggaagtgaccttccaggatggatatatggagccttgcagctctactgggtctttggatgctagctcttggaaccctgagtcaccacgggactgccctgggcaccactgccctgaggctgccatgcagtgagaagccaaaggcacatggagaggctccgtaggaagagacacagagagaaagaggcaggagacatggagagatcagacacatgggtgaagaacccatcctggatgtggaccaccaagtcccagccaccctagctgctgccacactgaccacagacaaactgcccaggcaagcctctctgaattcctgactcacaaaatggtgagctatgagaagctaccaagtttgaacttgtttttaaagcagcgactgataaccgcagcatgtagtcatggcattctttctgttgtattgtgccttatttttgatgcctaaggaagaacgatcttcctcccgaaaaagtagccaaagattcgctataaaatatagttgacctccatttggtagagattgaaatgagagagagaagttttgttccatgaccattctgtaaaccattccccacctccagcttcaaaatgtatccagtcacaccatctgaagcgtgttttcagcggacactgttattttaatatgtatttaattttacagttttatatatatatatatatatatatatatatatatatatatatatataatttttttgagatggcgtctcactctgtcacccaggctggagtgtagtagcacgatctcagctcactgcagcctctgcctcccaggctcaagccatcctcccacctcagcttcccaagtaactggaattacagatgcccaccaccaccctgagctaattttttgtatttttggtagagacggggtttcatcatgttgccaggctggtctcgaactcctgaactcaagccatcctcctgcctccaccttccaaagtgctgggactataagcatgagccaccatgcccagcctatatttatatttttaacaataaacatgatttgaatttataaatgtgacataaagtttcattaaaatgtatttatttaaatagaccatttaaagatttagtaaatattaggaatgcaggaggtgtactagttagggttctccagagaaacagaaccaatagggtatgtgtgtgtgtgtgtgtgtgtgtgtgtgtgtgtgtatgtgtctgtgtgtaaagagctctactataaggagttggtcaaatgattatggaggccgagaagtcccgagatctgtgattggaagctggagatgcaggggagtctatggtataattcagttcaaaagccagcagacatgagacccaagaagagctcatgttttagtttgagtctaaaggcagaaaagaaaatgtccctgctggaagggagtcaggcagggggaggtccctcttaccccacggagggtcagcctttttgttcttttcaggccttcgatggattgggtgaagtccccccacgtgtgggttgccatctgctttactcagtccaccagttcaaatattaatctcttccaaaaacaccctcacagaaacacttagaataatgtttaaccaaataactgggcacccacggcccaatctagttgaaacataaaattaaacatcagaggaggtatcggacatggcaaatatcacaaaggtggcaccccaggtctgaagcttggtaagcactgctttgagctagggctctctggtatggagggtttggagctgaaaccctggtggtattgttcagttcatctgtggggactgtgatcctctgactgtcttccataatgtctcctgggaaggttatctttcattttcagagcaccttttagagactgtccctggtggtgactaattctgggaatgtttgagccgggcttcagaattccagctgccctcatgggagagggagtttcccggcaatccaccactggtgactgtgtttattgtcagtgcctcggctgcccatagatctgcagttaagcctccctgctggctcccacacaggatcacatgtcacaccaacttggtcctctagtgagagaacgtctgccctggaagtcaaggttgttggaaaccctctcactatttagtgttaagtctggctcagtggtgacacagatgaaactgctcaacagttcagatgggatggttaaaatatgacatcatagacgccacgactggtccatgtctcacagccataaaggaagctggacgttttcatgtccccctctgggttctgcttgtttagatgatgctgtttggcaccatcaatttcacttccccactgcgcactctgtgaatttgtgcccagactgcccccaggagcagaagaaaaagtctttaggtcagcagttttatctctttggcctctttgactggaaatgtcattgcagaacagaaaatcattgaggggaacttcagggggattgaagaagacacattttttcccatttaggctgatgccttttgatgggggcatttggggcagccctcagcttacacaaagtgctgcaaatcagtatacctgttattgctctcactctgtcttcagctgtctgagacagggatggaagcacccactgcttataaatacaagatgtggtagggctggagagaggagtaggggtaggctgattcagaaagtaatataaaatacaccaggaaccacaaaatgcaatcaagaaaacaggcaagttcacaaaaacaagttgtatttattttgcctgtatattaataggatggaaacagtggtgatctggctcctgtgtaagagaagaaaatgtttttatagtgctgtatcagtttgctagggctgccataacaaaatcctgcagactgggtggcttacacagaagaaatttattttctaacagttctgaaagctagaagtctaagatcaaggtgccagtggctcttgtttctctgagccctctctccttgccttgcacgtggctgccttctcactgtccttatgtggcctttccttgttatgcttccactcctgatgtctcttacttataaagacaccagccctattggattagggccccatccttattataatacctcatttaggcttaagtatctctttaaaagctctatctccaggcagggagtgggggttcacatgtgtaatcccagcacttcgggaggatgaggtgggatgattgcttgagccctggagtagaccagcctgggaaacatagtgagacccccatctctataaaaagataaaatagcctatctccaattacatttcacattgggagttacgacttcaatatatgatttttggggttggggggaacaattcaatttataacagtgtttattttaagatttcatctgacagtttaatctatttccctataagcgatcaatggtaaatatgtttcataatggcctattattacttaccaaacatctacagtttctttaaattttaggccactcacattcctgctgtactcactccagatagccaagggacttcaggaaggtttcaactctaccccagggcagaggagatgatctgatgtctccagatcccttttaaagaagaactggaatctccacctatctcttcctttctggctcccactcaacgcccctctctgcctttttcctgcccacagtggtgcaacttcacaaagtatatcccaagcgatgagaggaggcaccagcaaacaaacctgcctaggaccagtgattttcctggggctttgctggtggcattctctatccacatgtcacttgatgccccttgactgaagatttccaggtgattctgggccctacccagtatggcaggcagtgtggggagggccagagtgagaagagcgagcctgggcacccttggagttggacttcttacctaatagccacagactcctcttcttcacagctcccaagattgtgtgagcctccaggacagaggctgatgctcacagtggccagcaccagggctcttctctatctgctcacgagcagccagcctctctctgtttgctaactgccctctcccctgaccacatgagcacagtgcctggcacagagagacgcccacaggtttttcagagggatcgatgaatgtagagaacaccaggaaacacaaaatgcaatcaagaaaaataggcaatcctcccacctccgtctcccaaagtgctgggattacagatgtcggtagagagagagagagaggtgcataattatgtgaggggttaggcacttgagggcttcctcgactaggctacctgcgttctggttttgaatttcaactgttttaatggacatctccacctacctgttccacaggcatcctgaactcaacgtttccaaaactggactcatcattgctcccttccccatatcttccccttctcctttattctgtcttcattgaaggtatcactgcttccccagctatccaagataacagttttagaatcccaaactctccttaccccatgccttccaattgggaaacaggtcctgatggatgttactttcaaaaaagttttctgcattctccctttctccatccaccccttggtggcccttcctcagactctcattagcacccttcacagggaccaccatgatggcctcctgccctgcttctctgcctatattttctcctccctttaacccgcttcatacgttgcaccaagtttatctttataagatgcagttctgatagtcttactccatttgtgttgctatgacaaaatacatcagactgggtaatttagaaacaatagaaattgatttctcaaggttctgaaggctgggaagtcctagaccaaggtgccagcaggactggtggctgaaagcgctgctgtctgcttacaagacagtgccttgttgctgcatcctctagaggggacaaatgcagtgtccttacatggcagaagggatggaagggcaagagagtgctcccttcaccctcaagccctttgataaggacactaagggatctgctctcatgacttaatcatctcccagaagccacgcctgtaaatactgttgcattgtgagttacatttcaacatgaattttggaggggacactatcattcaaaccatagcactgatgtactcactctagtgcttaataatctcagatagattccattgctcacactgatggttgccaaatgttttgcctgtgttctctgttaaatcatcccaatacacatatatgttatttataattacttaattattaaaatattcttgagtacacatccccaacatatgtatattgatagattatatacatactacattaatgcattatgcacattataaaacatatgcaaaaatagaaatgaaaaaggccacatgagccttttgcccttccctgaacattctcaaagcctctgtgtttttcccattttctcttcccatgtcctggagttctcttttctcacttctgcatgtgatgaagttctgtatgtccttcaagacagcactctaggctgggcatggtggttcatgcttgtaatcccagcactttgggaggccgcggtgggaggatcacttgaggccaggagtttgagaccagcctgggcaatatggtgagacctccatctctccaggaaaaaacaaaaacaaaaacaaaaacaaaaaacaaaccagcactcttcacttgactcctgggaccctggctccccacacagactgccttggtgccatctttatatatagtgtttagaaccttcaccttctcttgctgcatgatttgataatatctttctgatgggcaaggaggaagacggaaggttttggggtgtatgtcattgtggttgccaagaacaagttgtcatagtaacatatctttccttccttgtgaaacattccaaagaggttttttccccctttggctttcctctgactctggggaaaatacatcccatcccctgcagaggagtgcagaagcaggcagtcagacagacacaaagggtggggagtaattgggcgagatgtgcaaaagtcaactcaattcccaatatcaagcaattaggctaatgtgatttagaacaacgtgatcagtgaagtttgtgtttatgctcccctcagactgtaattaattcatggaagtgctgtaggttgttaaattttgtaaacggataatagaactgttctttgaaataaaagcagtggcaacaacctagtcattttacagtagcgtgaatagaagataattacagtttgagagaacatagccccctttccgtacaagaacaggaatggattgtcttcggctgggagttgctgtgagcacaaattgcaaacaaagtttatgtgctctgcggggaaatggcaggcattttccccatatagtcaaggagagtgcctaactcactttttagatatttctaccagtgtcctacagggaattgtgctaataaatatgacaataacattgtaatgggaccagaaaggctgacccagcgttttgttaatttgtgttcagcatttgctgggagctttgtaacccctgagcaatgaaacaggagcatattggttggactgtaggcattttaattagaggtcctgggaataactctgtgctgtggcagctggataagacctggcccctcaaagtttacccatggcgagcttccctcctggccctcagcggccattaaaaggtcttgctagagaaagggacctgggggagggagtgcaaaatttctaaggggaggaggaagatgcctggtgggctggcgtccaacagcaattagctactcagctgtcagtgcccagagcccttgctttaacaaagtggtggcaaagattgacagaaatggcttgaccccatgatggatcccaaagcattttgtaaaagggtctttttactcttgctaccttttcatcatctggcttaaatacaatgcaacaataaaggcatcataaatcaaaagctgttagcacacatggcccctgcaatttatgggtattaagccaaaaaaaaaaaaaaagcttaggaacatttcatcaaattatttttccagtcccttaagactcatttaaatttccctcctctccctaccctggtgctgccagctatttcatgcacaggagcacctgagcccagggtggagggagccaactctgccagcgggcaggcggttcattctcatggggtggggcctgaagctctgcccagctgcaggcaccatgtgggcaaacagccaagaatctagagaaacagatggcagctgcccttgggtcagtgatgcagctttgggaatggccatgtccatccacactaaacctccatcctcacctctttcaccatgagtcctggggctggggtgggagctccagtgggagatggcgggattatttggaggtaaggggcccaatgccaggttgggttggggactaaatactcaaagccagccacttctgtgatggtccagtgccggctttggaggcccaatgctaagtcctggaaggcccggtgcagagtagtgggcccaccagaggccagcattaaggagcagaatccccactatgctctgggtagtggctgatagatctcaacatgtcagtggagaagtagaaaccggttggtggcgttacttatatttgttaattagtgagcccgacacataattattaagcatcgaggataggcagggcacatggaacaattcaccccgatgtgcagagacacaaagtcagatgaatgtccaaagggccagaagtgggcttcctgcccttcaaggatcacctcctccaggaagcctgtacaggttgctatgaggagcagatgagcatgtgctgaacattctgaatacaatatggattgtcaggctgagcccttgctcattgtttattgcgggggggggaaatctctgttttgattgtccttgagttgagaagggactcttaagttggaagctttctggacctttgttgtgtgggaaaagtagaaggcagttggcacaggtgcctctgtggcatcacctggccccgtggtaaatcctatcttattcaatgaggaaacaagggaagagaagtggtgtctccttagccacttctctgagcttgatgggaatatatggcttaagaactcatagccgtggcctccatgacaatcccttggctcccaggctctgtgactccccagtccatcctggctctcttcagaggtaatgtctgtcaaatttcaatgtcattgttcttattataattaggaatattgtatttcagaaccaggctggtttctcatcaggcctcattgccagtattacagctgctttgtgctcttagatctgagggcctataaaacagctcaccacatatgtacaactttacgtcactcttcgctgagctaagttggaaaatttatagttctaaaaacacagagtcaagttgaaaatgtggctttggctgagtctgggtgtaattggggttttcaagtgtagtttgacagctttcatgtaacagaaacaccagggcccataaaatcaggccagtgtcaggatttcaggtgtattaagtatttcagcagtggctgccatccttcactttcatttaaatgggggtatgaaaatggaaggacgtgatgctttcaaaaggccacaatctcagtcctcctcacaattagtgagaataagcatgccactaaaaaagatgatatctgatgttttctcatttattcatttagactttgttatccctgtattttaggcactgtcttagaataaaagataagtagggtgtgatcctagccttcatggagctgatggtgtagtagaggggttagcaaacattttctataaagggccaaatagagaacatttcagatttgggggccatatggttttgatggcaccacccttgacagccaccccatgcctgctccacacccctaactctccagtactcacttcctgcctcaagcctactgatccctctttttgcttcctatagccattttttcctcacctgcaaaataggtaggaatgcctccagcacaggcttattgtgaggatgagctgagttgactgactgtgtaaagccctcatttggggtctggctgccactttatttgtttagttttgagacagggtctcactctgttgctcaagctggagtacagtggtgcgaacacagctcattgcagccttgagctccaggcctcgagagatcctcctgcctcagcctcccaagcagctgggaccacaggggcacaccatcacgcctggctaattttttaatttttgtagagtctcactatgttgcccaggctggtctcaaactcctaggctcaagcaatccttccgccttggcttcccagttgtgctgggtttacaggtgtgagcccagctctggctgccacactttatcctttccagagatttttaaaaagggacaactggataatattctctgctaggagaagatgtttggagagctaagccatatttaaaaattaaataggtgtgtgtgtctgtacatatatacacataggtataaaatattgtgttttgattctgaaaattagatatacttggaatgcaaattgcaacatattgcaatttgattctggcccacattctctcctggcccctccagactctcctttgggcaccctgcatctgaaaggctgaaattaaaattgagaatggagacctggatcccatgttgccttcccaagggggcctggccttggggcctggcctccagtaactatgggcatcctgccagggcttattttgtagcagacctttttctttaattatatttttgagttgtacaagttgtgcacacacacacacacacacgtttcatgtttaaaatgtaaattagcaaattagtacagaattcacaaagctgtgctctccaactagcagccagagtgagcctttttaaatgagtcagatcacatttctgctcagctcagaaatgcccagtgactccacatcttgctcagaaaaagagccaatgctctttttttttttttttctttttctttttttttttgttattgatcattcttgggtgtttctcgcagagggggatttggcagggtcacaggacaatagtggagggagggtcagcagataaacaagtgaacaaaggtctctggttttcctaggcagaggaccctgcggccttccgcagtgtttgtgtccctgggtacttgagattagggagtggtgatgactcttaaccagcatgctgccttcaagcatctgtttgacaaagcacatcttgcaccacccttaatccattcaaccctgagtggacacagcacatgtttcagagagcacagggttgggggtaaggtcacagatcaacaggatcccaaggcagaagaatttttcttagtacagaacaaaatgaaaagtctcccatgtctacctctttctacacagacatggcaaccatccgatttctcaatcttttccccacctttcccccgtttctattccacaaaaccgccattgtcatcatggcccgttctcaatgagctgttgagtacacctcccagacggggtggtggccgggcagaggggctcctcacttcccagtaggggcggccgggcagaggcgcccctcacctcccggaccgggcggctggccgggcggggggctgacccccccacctccctcccggatggggcggctggccgggcgaggggctgacccccacctccctcccagacggggtggctgccgggcggagacgctcctcacttcccagacaaagtggctgccgggcggaggggctcctcacttcacagatggggcggttgccaggcagagggtctcctcacttctcagacagggcggccgggcagagacgctcctcactcagacggggcggcagggcagaggcgctccccacatctcagacgatgggcggccaggcagagacgctcctcacttcccagatggggtggcggccgggcaaaggcgcaatctcggcactttgctgggccaaggcaggcagctgggaggtggaagttgtagcgagccgagatcacgccactgcactccagcctgggcaccattgagcactgagtgaacgcgactccgtctgccatcccggcacctcgggaggccgaggctggcggatcactcgcggttaggagctggagaccagcccggccaacacagcgaaaacccgtctccaccaaaaaaatacgaaaaccagtcaggcgtggcggcgcgcgactgcaatcgcaggcactcggcaggctgaggcaggagaatcaggcagggaggttgcagtgagccgagatggcagcagtaccgtccagctttggctcggcatcagggggagaccgtggaaagagagggagagggagaccgtggggagagggagagggagggggagagggagagggagaggagggagagggagaggagggggagggagagggagaggagggagagggagaggaggagcctttccaattttctttccttccttccttccttccttccttccttccttccttccttccttccttccttcctccctccctccctcgagccaatgctcttaagtggcctgaaagacactctatgctctgcccccacctctctcccacaccatttcctaccccgccttccctctgtcactctgcacccaataccctgggctcctgactgtctttgaactgtccaccacaggacttttgcacttgctgttttctctgcctggaatgtttttcactcccatatgcccatagctttaagttccttgaagtctctgctcaaacataccttagtgagactggaccatcaatgtcaaataacatgctcactgccatcatgctctatcccccttaatctaatttattcttgtaatatttatcatcacctgacttgctgcatatcatttggttgtttattgtctgtctctcacgaatataagttccgtgagaacagtgactttttgttgttgctcgtactgtatcctcagtgctcagaacactggcacgtaggaggcacttgagaaatatttgttgagtaaagaaatgaataggccgggtgcagtggctcacgcctgtaatcccagcactttgggagacagaggcgggcagatcatgaggctaggagatcgagaccatcctggctaacatggtgaaaccctgtctctactaaaaatacaaaaaaaaaaaaattagccaggtgtggtagcgggtgtctgtaatcccagctactcgggaggctgaggcgggagaatcacttgaacctgggaggcggaggttgtggtgagccgagatccagcgtgggtgacagagcaaggctcggtctcaggaaaaaaaaaaagaaatgaataatgaagactgtagtcaaaagtcagaatttctgtctccaccctccatgtgctaacccccattccacatttctcagtcatacgccctgtcagcaacatatccttccaggaactttgcatatgtaagaatacctagaagcttctgcttccagttaggatgtagaaggatgtgaaagacatttggacttgggaaaaacctggagaaattaaaaccatacttttctatgagactagtgaaaagtaatggacacaaaaaaatctcgatggactctattctggagagaaatgagctcattgtaggattagcagagttataggttccatacctggggtggggggcaggtaggcaggcataggtgggtggaggactggagtctcgccaaggagacgccctctgagccatctgggaggatgacttcgtatgtacctagccagaaaagggaggtggggaagggattacaggagttgggaatcgtgtgtataaagatagtgctgtctggagaacagtgagagtgtgacctgggtctgcaatggaagagtgggcttaccatagacagagaatttacaaggagaaatcggttgggctttacataacagcatgtgctactagaagggactggaatctgaaggaccctctggttcagtcagaagacataaaccacattggcaattggaatagggaagttttaatataaaaaactcttaaagtagtaaatgcagagatcagtaactactctgaaagttcaaagaaaagtaaatgatgaaggaacgcagaaacttggaagaggggagcccctgcaaggttaagattcggactcttgtcaatggacagggcaagttgactgatattggggagcacttgctcccaaatcaaataactgtcctcctctgtttaacactgccaggacccttgcttattgatctacttgccaccaagtagaaaaatacaacactggaagaagaaaaagtccttttttcctcttccagacttgcaatgtgtctccaatgccctctattgacaggacctaacattaagccaactggcaaagaagtaatgtctgtagaattgggccccagtataacagagagggggaaagaaagatggatttgttgctgaaaagcaataaattcttaagtggcacaaaacacatacacaaaaaacacaaattcatttttaaaataccccaaacctccccctttctgaattttgctgagaaaggaccagtgaaggaaaggctaataggtagataaaaatcacatcttttccaacattcttctggtttttgcatcctgggactcctgcaggagttgaattcaaaggtaaacaaaaaatagatgagactggttgggtattgggcaaacaacaggtaaactcaatctaaataaagctgcagctcagcactagttcaactcaattgtaggcaaatttgaatagcccctagatagagaaaagggcttgcgattctgggaaataaataaaaccaagcaaaaaaattagtatgttacattatccactgttaacacaatttttggagtttaatttttgtttaattagacatgtaaagaaggcggaaaatgttacccatggtcaagaaaaatatagacaataggagcatatccatgctgagggcagtggtgtgtgcctatagtctattccaactactcgggaggctgaggggggaggatggcttgaacccaggagttcaagaccagcatggggaacaaattcagacccccccatctcaaaacaacaaaacaaaacaaaaaaccacattcccactgtggattcaatactagaaaaaaaaaaaaaggaacatatccacagtggacctagatattgcaatcatcagataatgggctttaaaacaactattttaaatatgttaaataatttaaggaaaagagatggatattttagaaaagaaatggaaactctaaagataaaaacaagtagaaattgaaattctagaactgaaaaatacaatataagacataaaaatcactggatggggttagcaacagattagccactgaagaacaaagtataagtgaaattgagccaagaaagaaagcaatgatttacaggcaaaaagcagagatgaaaagaaattataaaaaaactaattcaaaagaaagcaggaaaagagaaaaaaggacaaaactaaacaaatagaaagatggtagacttaaactcaagtctattgtctatcaataattacataaaatataaatggagcaaacacatattaaaaggcagagattatcagactgaataacaaaaacaagatccaactatgttggctacaagagacagactttttatataaaattgcaggtagtttacaagtaagagatcaataaaagatactgtgcaaacattcatcataagaaagagggagtgactatagcaatatcatacaaagtagacttaaagacaagcagttttatcagaaataaagagggacactcataataataaaagagtcaaatcatcaagaagatatgaaactcttaatgtatttgtactataataacagagcttcaaaatacatgtagcaaaaacatacagaaataaagggacaaataggcaatttcacaattatggttgcagattttaacactgcagttttagtaactgacagaacaactgaaatacttacaagggtatagaggatttgaaaagcactatcaactaacttaactaataggtatttatagaacactatacaactacagaatacaccttcttttcaaatgcacatggaacattcaccaacatagacaataagctgggccataaaacaagtctcaatacatttcaaaggactgagatcatacagagtgttttagaagtcaatagcagaaacgtcaggaaaaccccaaatatgtagaaattaaaacatactaccaaataacccttgggttaaggaagaaatcaccaggaaaattagaaaatatttcgaactgatgaaaacagaaaagaaagctcagcatactaaaatgtgttggatgtgactaaagggacgagtagaggggaatttgtggttttaaatattcacattagaaaaggaaaaggtctacaagcaattatttaggcttctaccttaagaagctagagaaagaggagtaaattaagtccaaagtaaaaaaaaggaagcaatcaaattaagaacaaaaatcaatagactaaaaatcagacaatagagaaatattggcaaatcaaaagttctttgaacagatcaataaataagattgataaccccaagcaagattgatcaagaaaaagaaagaaaaatgcagattaccagcagaggaatgaaagaggaggcatctctacatcactaagaatattaacataataacaaggaagtattatgaacaatttatgttaataaattcacaacaaattttttgaaaaacacaactgaccaaatctgacataagatgaaatagaaaaccagaaaagccttctatattaaaaaaatgaatttataattaaaaacttttccataaaaagactttcagactcagatgacttctgtatgaattctatcaaatacttgagggagaaataatatatcttatatatgctctttgagaaaacagagacagaggaaacacttctgatttctttgttattgctttgaggccaccataatcctgtcatcaaacttgacaaggatactataagaaaagaaaattgtaaaccaatatccttcatgcatgtatatgcaaaaatccttaagaaattattaacaaataaaattcatcaactcataaaatggatagtatgtcatagtctactggagtttacttcaggaatgcaagcttgtttagcattctaaatccatcagtgtaattctgcataacagaataaatgatagaaattatatgatcatctcaatagatgtagacaatgcatttgcaaaatttaatgtctgttcacgattaaaaaaacctcttaggatactaagaatagaagaaagtttctcaatttgataaacagcatctatgaatacctaaagataacatcatactttaaatatttttaaaatttaagctaaaatcaggaacaagcatggatgtcctttctcaccacttatatgcagcattatcctggatttccaaccactgtaacaaggcaagaaaagaaatttaaaaaattaaaaggcaaaatgattgcaaagaagtatgatttttaattcacaaacgatatgattatgtatatagtaaatctaaaggaatgtacaaaaagccttactatatatggtcacttagaagtagtttactagtcgtatacaaagtcattgtacaaaaatcaattgtatttccgtgtaaaagcaacaattaactggaaaatgaagtaaaagtactactcacaataacatcaaaaacccaaatagacttagtgattaatttaacaaaatgtgcaagacgtctacaccaaaacctgcacatatatttctaagacaaactcaagaagtcttaagtaaatggagagatataccatatgtatggattgtaagactcaatattgttaaattttcaattctttccaaaatgaattcaatgcattcctaatgaaaatgccagcaggttttttgcacttatatggaaattcaaatgcaaattacaaaacaatcttgaaaaaggaaaataaagttggagaatttatactacatgatttcaagacttactataaagttatagtaaccaagagagtttggaattggcataagtataaacaaaaacatcaataaaacagaatcaagcgttcagaaatagattcatgaggttcatttattttgacaaaggtgccaaaggaattcaatgaggacagaaatgtctttcaaacaaatgatgttgggatgactctatatccatatgcggaaagagtgaaccctcagccttatctcacatcatacacaataattaccatgaattattgtgtgataatgtgataagtacaacaacaaaataatgtgataacttgtaatgtgataagtacaacaacaaaaaattagaagaaaacacaagacaatatcttcatgatcttggggtgggaaacatttcttagaaagggcagagaaaccactaatcataaaacaaaaggttgctatcttgaacttcaaacatttaaaacttttgcttattaaaagactgtatttagagagtgaatagataagccacagactgggagagaggttttcagtacttatatttgtcatgggacttgtctctagaatatataaagaactcctacagctcaataatgtaagaggcaaacaaccccataaaatttgggcaaaagacttgaacagccatttcaaacagaagatatgtaaatagccaatatacacataaaaacgggctcagcatctctaataatacaggaattgcaaattaaattccacccactagaattgctaaaatgaaagactgacagctccaatttcggtcaggatatggagcaactggccctctcttacattgctgggagtgaaaatggtataaccattggaaaattggcagttctttataaagttaaacataacctaccctacgaaccaacaattccactcccaggtaattatccaggaaaataaaaacatatgtccacaaaagacttgtagagaaatgtttctggcagatatttttcaaaatagcttaaaactggaaacaataggaagtccatcaacaggtgaatgaattaacaaattgtggcatattcacataaaatggtctactattcagcaataaaaagaaatgaactgctggtatacttacaaatataattatgagctaacaaagccagatgcaaaagggtatacattatatgattctatttatgtaaaacttaagaatggacaaaactaatctatggtgatagaatagtatctgccgttggaagagtaggactgacagagaagaggcataaagaacctttctggctgggcgcggtggctccagcctgtaatcccagcactttgggaggccaaggcaggtggatcatgaggtgagcagtttgagaccagcctggcccacatggtgaaacaccatctctactaaagataaaaaaaattagccaggtgtggtggtgcgcgcctgtaaccccagctacttgggaggctgaggcaggagaatcacttgaacccgggaagtggaggttgcagtgagctgagatcacgccattgcactcaagcctgggagacagggcaagactccatctcaaagaaaaaaaaagaatatttctaaggtgatgaaaatgttctatattttgattagggaatgagttacgttggtgtatacatttgtcaaaactcaaaactcaaactgtacttttaagacctatgaaattgactgtaggtaaattatactgcaattaagaaaaatattttaaattggaaaaaatctaaatttacagggaaaactttagttgcacaaattagcagggaggttaaaaaaaatggcaatattacaagaagggctattagattttcttcatcttccccaaggatatagcaagaaaaatgcttttaaatgacagcaaaagactgctttaaatttatgagttaattaacacaccactatacctaataagataaaaggcagcattttccccaattgaaaggttgatgtatactatttgtacagggttgaatagtgtccctcccaacattcatgtccacctagaaactcagaaggtgaacttatttggaaatggaacctttgctgacataattggttaagatgaggtcataaattaaggtgggctgtaaatccaatgactagtgtcattataagaaggccatgtggtgatacagagacacatagagagagaataaggtcatgaggccatggaggaagggactggagtgatgtagttgctggccaaataccagaggctaggaaagggacaggaaacagattctcagatcctccctcagtgccccaagaaggaatcaatcctgctggcaccttgatttcagacttctggcctgttagaaaataaattttgttgttccaagccaccaagtttgtggtcattatgatagtgttaggaaactaacacatatgctactcagctaggttatcgaagtaagtattcaaccatctgcctcgcacactcaggtagatttgaatcaataaactgaacaaaacgtgctctaaaaattatatatatatgtgcatatatatatatagacacacacacatatacatacgtatacatataatatgttctttcttgtatacagtttggataacatacaagtgaaataactgtacatactcactggctacttcttattagtgttttccaccagactaatacattctgaagacatttccttgttagtacatagagaagcccgaatgtgcccctccaggctgctttgggaccagggaatgattgtttctaaaggaggaaattatattccaggatatgaatttatcatgatttatttggccagcccagttcaattagatgaaagtttattaaatgtctcatcctgagcatttccattttaatctgtttaattcaatccaatccagtgcaaaccaattcaataagcatctattgagcaccttctttgtaacagtcactctgctgtgatcacatcttttggtttcatcttaattgactacctctgccccttgggtccatagcaaagatactttttgaaaacttgttatgaaatatcacaagagactgatgataagaccataataagagagattgatggttgggatgaagaagatatttttctttttctatactggccttcttcttctttttgtttgcttgtttttttagtttagtttagttttgttttgagacagggtctcacactctgtcgcccaggctggagtgcagtggtgtgatcttggctcactgaaacctcccaggctcaagcaatccttccacctcagcctcctgagtagctggtaccacaggtgcatgccactatacccagctattttgtatttttggtacagatggggtttcaccatgttgcccaggctggtcttaaactccagggctcaagcgatccactcacctcagcctctcaaatgctgggattacaggcgtgagccaatgtgcccggctcccttgttatttcaataggctgtaatatccttaccaaattgggcttcttagagtttaggatctgcctcaggaagaaaagagcaactctcaccttataaagaagcgacagaaagaatgaaagcagaaagaacaggattccactggattcacactgagaaatacacacttctagaacagtgagaatgaaccaacaggtcctgttctgcaggtgttcagcttgttttaagcatttgtttgtcctgtacgcttcccagttattggttctgtgtctcatgtgcatgcaggggcttcctgtctgtagaataaatacccactggctgtgatacctggtatctcatttagctcttgttgctgctgaggtaacaaagaacattaattactgctttcctgtttttaagttagaccgggtcttagcaagaattctgagtaatcatcctctgaattaataatttcatagctggataccctcacccttcatacagggggagagagggctacacaggagatggggatcattgggggtcatttctgggggctgccgaccacattgtgcctccaccttgtgctgccacatggaatcagccgtctctgtccaagctaactcccttcagttatttagactgttccccagatgaaagttttatatgcctttctccttcctccttttggattcaatatttgtcttagttcttacccccagaagcaagtggaaaactccagatattgtagataatttgttattgtttcccttgatctggatcctatacaatctatattcccattagctttttgataaaatggcccacaccaaaatctaagtgaggtttgtcattagcaatattctcaaatctttttcaaatagcaaggctttcctgtcaagtctctttggtacatttgggggtgatattttatcctttttatctttttttttttttgagacagagtctctccctgtcaccaggctggagcgcagtggtgggatctcagctcactgcaacctctgcctcccagattgtagcgattctcctgcctcagcttcccgaatagctgggactacaggcatgcaccagcatacccagctaatttttttgtatttttagtagagatggggtttcaccatgttggccaggctggtctcaaactgctgacctggtgatccgcctgcctcggcctcctaaagtgctgggattacaggcgtgaaccacaacgcccggcccccttttaccttataaagttttcgtctgattgatttggtctacctaactaaaattttctgaattgcaatcctgaaatctgtaacattagccatccctctcaaacttatgttgtttgcttatctgatgataggcctgccttccaaatcttcattcatgttattgggtagaatagaactaaaactagagacctgtggcatgccactggagatcatctgcaggttggtgctgtcatcaatcatgcaaccaggatcctgggtggtgtctcattagttacgattctacccaacagtgttatccttctgctcacatgttcctatctgatccatgaaataatctcgggaaattttatcaaatactttgcaatcaagatggcccatgattatagcagtcctctgatttcccacctatttgttcccctccccttcccccaaagtaaatctagttaggtgaagccttaaactttatttgtttttgtttgcctgtttttgagacggggtctcactctgtcacccaggctggagcgcagtggttagatcaatgtcttactgcatcccctacctcctggggctcaaaagatcctcctgcctcagcctcctgagtagctgggactgggattacaggcacgagccaccacgctcagctaatttttatattttaagtagagatggggttttgccatgttgcccaggctggtcccgaactccagggctcaagtgatctttctgccttggcttcacaaagtgctgggattacaggcatgagccactgtgcccagcctgaagccttaaactttaaagtacagtaatttgctcttagggagacaatgttccaatatcagtaattaccacattctttaataagtgttactagcttgtttaataatcagttctctgattattcacatcccaaatccaacctcttttggaaattgggataaaatatgcccttctctgctcttccagtacttcccttctttcctaggtttctcagacattttccagtggccactctgagactctatctgtaaactcctgctgcacttgaggctgagttttgtctgcactgagagagatttgggctcattaaagtgatgagctgccgtcactatctctacccctcctgcagaccaatttcttagcatgcgtctgccatctccagtttgagacccttctcttttctgtcctaaactgaaactaaatagtcctgaggcattttgggagtctccctgtcacttgctaacctccagtatactttaagcagtaggctaattccatccctgttcttcttgctctggaaattaagaattagcctaatgacacatccctgttgcctctatttttagtgaccctgggcttgttcagtgcttttttttttttttttagacggagtcttgctctgctgaccaggctggagtgcaatggtgcaatgtccactcactgcaacctccgcctcctgggttcaagcaattctcctgcctcagcctcctgagtagctgggactacaggcatgcaccaccatgtctggctaatttttgtatttttagtagatacagggtttcaccatgttggccagtctggtctcgaactcctgacctcccgtgatccgtccgccttagccttccaaagtgctgggattacagacatgagccaccatgcctggcctgtttggtgctttgacctttgtgggacttgttggttcctgcagtaggtgtggatggttgtcctcgtctggccattcctgatgctgtgtgtgcctttctgtttgcacgcttgtttgacatccctttgtatcttcagggcctgggacaaatgccttgcatttagtaagcgtccaataaatattcatacagatatggattttcaaaaggtaaactgtgaaagctaattaagaattgacttaacggctgttgcatggccccaggagacctttgcgaaggggagaagacctagaaaataatccggtaagcccctgtttgctggctaacccccgagggagagaaagcaggaaaaaagtgttgttatttttccttttctgacctttctttttgcaactaagaagtggaagtcctcaattgtatcattgtattgctctctctccccctttctttctatgagtcaatcaaaccatattggcggaggattcactgtatgcaaagccccaagaggtcacatagattttcaccaggcaagatattgtccatggtaatactactgttgacttgtctcagggtgattgcaaagcttcctggctttttgatcttgagaagtcagctggtaaaatgcaacatctcccacccacctccagctagaaacagaagcgctgggagatgaaacttcttggatctctcagcagctaacctctcgttgaccaggtgccagtgctgaaaggctggactagactggacttgtgccacttttcacaagatctggagccttcctgagctgtcatctgtatagatttgacagactctccatctatacggtgggagtacgtaataatatttgccttaaagtcttgtagtgagaatttaataaaataatatatgcatgtatgtacgttttattaattcatttattcacccactatttgttgctttgctggtcctgtgagctgggccctgtgtgcagtggtgtgtgtcaggatcagtgcccacagcccgggggacatgagtgtgaggggagaggccaccaaggctgggaatcctcccttccacaggtgtggtgctctgagggaaggaggacttgttcagggacgactcagagatgaatctggtggttttgctgtgggccggcaggcctggtctccagagattctgtgtttgtgattattggccactgtccttgtctggactaagtgtgtgtggtggctgtttcttcctgtgtgacctgcccatgtatcctaggctcctcgattctgggagactgcgatggagaagctgtgtgtcaacgacgcaggacatagggaattcagccgtgcgctgtctgcacaccacaacatgccagaggaacccgcctggaaagggacctgtgtttatgcggggcagtggggaggcaggatgggctgggactcagaggagatgtgatgaccagaggtgctccgcttccctcccgtctacccacaaacatccaaggaagggatctttctgggttcatcttcacgtccctgtgctctgcatagtgtctggccactctaggtccccagaaaatattgtcaaatgattgaagggatgattgaggagagaaagagaatagtccacttctggccagtacttccctttgagggttaagaattcgcttttgaccttggtcttgcagtacttgtgaagcctgcggaaccaacaggctgtgtaagagtgaccactgagggacatgggccagagaagtagtgacctgcccacagtgtccctggtggagcaacgctgggactgtgcctatcaggacagctgagaagcctttgtgatacttggtgaccagaagcaaattaggctgcattttgtcttctttcctgtaagtcagggaaacacacactgggggagagttttcctatgctccttgctccagcccccactctttcacccattctgttctcagacctggtgacattttactttcctagtatttgaagaccctgggctttttctttgtgaaataagaggggagaataaaccggtgtgtagtgactgtacatacaatgatggcgacagtgtcaggcaccaccagtaccctagccttcctccctggctcacagctttctagagagctctaaaaccctccctaataccagggtgttggtagcagcttcacccccatgagatgggcatcatctagatgggagacaagactaacgtgatgctctgtagaaaaagatgaggaatgtcgcattgtctggatgggtgtatttcttttgcttggcaaataaaaagaaatgatctgtctttatgttgcctttagggacactgcaaacaagatggttggaaatagagtttctattgactctctgttctctacaaagagaacaaaagaaaataattacccaggaagaatagtaatttgtatcacacagggtttaccaattatgacaggatctcatggtcattttctcatgggatccttatggcagcctggtgacatggctctggcaagtactgaagtctccgtttgacagggcaggacactgatacccaagagtcactctgctattctgcttactgcccactgcaatgcaaagccagctttcctggtccttgcagaaacatggtccttgtctattggggaagcaaagctttcagctaccaaatgtggagaaacaaaatcaatttcacgataactgtgcacttgctcttgccttttacctctaaatgcatctttccttgacctgcacaagaggtgaaggcattggtcctggtgctgttttcatgtttattttctgctgattgttccctgggtccgaggtggtatctttcttagacagttcttggagggcaaacattgggttgctatgtgtcattacatagcagtaacaaagtgttttagatacttcagtgttttccaaagagtatcatatgaaggtatcatagttacacatttctgtacttcaggatgagcatctatatgcctgaaaatctgtgtgaaaatgtctgttggaattccttgaagaattcacaaccccacccccgcaagactggtgaatggattcctacttggcaaggtgccgacttggagagttgtgatttgtgttatttgaatcttgttgctttattgttgaagttgtaagaatttttattagcaaagtatgtgaaaggaatctagctatactgttggtttatattacaaaaaatcatcttgaaaagagaatttgctttatagataaagattgaactagaaacaacccaaacaccaaaccaccagcgctttctcaaaactaaatgtaaagtataaatagagaacaaaacaggaaatagtggtttgcaaaaatatatatatatgtgtgtgtgtagctgcattctaaggtgtctttccttacactgtgggatgtgagtgccgaggctgagtgacagtcgcagctgctgcctccttagcagagacaagtgtctcgcagcaattgctgtcttactgctgcctgcaaccactctttagcaatcttcaaaaaaaaattcggatcagctctgtaggcaataaataattatgttgttctattcacccggttatttcatgcccagagagttgactgggttactttataccatccaagctttcatgttgtatcagtcccatttctttatatcctatagagacatggagatgtggcctgaaggatcagatttctctcctgtcccccagccagctctgttgccagctctctgaattctgtccagggccgacacagggagacagctgtagggagttatgcagagagctctggggtggaatctaccctctgcccactaatgggtgatctcatgtagcctctctgggccttagctcctcatctggaaatccgaggacagtaatgcttatctcaaaaccattgtgaaaattaaaagagatgaagtaggcgaagagccatcttggcagcatgggatgctctgcgtcttattgcagtggccttgttgttggaaagtggttgctgagtcctctgcaggtaaatttctgagcctggtggccactactaaaaacaaaagacaagtaccctgggctggactctgctgcctcagtgctaaggaataggaggagtcctggaagagggctgggacactgatcgtccattcatttgttcatacatcatttatttaataaatatttgtcaatccttaagatgtgccagacactgaaccaggtggggatagatggaagaagacacagagccttctccaaggagctcaagcatattagaacagagagacagggatgccaataaacagaataacatgttgtaggtgctgtgatagaaatgggtcaattacagccacaagaaaggatgtagaatagaaagattctgtccaagtagcaattttcaggcaagactgtgggggaggagcctctggaaagccacttccttgagaaacacaaatttttgtaggtggctccttttcatctagccaggggaaaccactcacatttcaggcagaaactgacactggtgggagagaggataagctccctcttgctgagcaaagaacaagtaatgcctcttctttgactccaaccttagacaaaaccatgagtgggggccccagattagaagcttctgagacctgctgcgatccaactcacttgagttctcattgtagctttgattcagattagaagcaggtcagtttcattattccagaagactttcttagacttggaaataataatgaaagccttctggaatgagctaggagtagggaaagtgggactgcagggctgcacacaggggagccttcagcttagctgtcctagatgtcctctagggttggtagcaaaatgggagcaccccaaggcccccttggagtactaggctgcaaggagctagtgagggtgaggtgcggaggagctgtcaggcagggtatgcgccaggctctgcccctcccttggctgttttgtggccctggaaaacctcagcctcgtaggacctctctttttttctgagcatcctgggctcttaggtcattatccgtgagatactagttgcttcagaactgtcctcctgccatatcatgtacagatgtctcctctcccttactagctatttaacttctcaaagtcaggaggggagtgcagaggacaggctccaccacagcaccccggtgaccttgcacatctccacatgggccacataggcaaggctggaccacggctgatctcagtcctggaagagtgacctgtgatcctctctgagcatgagagtgtgggaggcttgggaggtgctactacaaggccattggccactcacccctctatccacccaggaggctgtcactagatgtttctcactgccttctgggtgcttaggagatgggaggctttctgcctcaccctgtctaagggcacagctgcaggctacgaaactgattcgctgcagcctgagatcagctcctcagcagtggggcgcaacagcactcggatcgcagtcaccttgttcctgcaggttttgtgttgtcctctaggacaagggacacagggagttggtcctcttcttgcttttgctgtctaagtgagaaactgagcccttaaagcgtttgtttaaagtcctactcatagaagaagaatgcactccttgacccaaatacaactctggaccgggaagatacaaataagaaaattagaaaataaaataaagaaaataaataaaccaggcgtgtctgtcagctttgtttaacagggagttgagagatctgaacctgtacagtatggggccgaggcccagaatggtgaagtgacttgtctctgtctcagctagctaggagtagagccagcactaaagtccagccccctaagtccagggtcatgtccactagcacctggtactatgcctcatgtgccataaacacccactgaaatggttgctggtctgctcagccaaaccactggggtgattaggatcccagtcagggcaaatgcacacaccacgggccgtgatgagtgcagcccccacatatgggcttgtgatttggagtcttttcagggtccagagtacctgactcatttcacctcccacgcactagggcagctggccctggctgatcaaaagctgaggatatcagagccactcactcatttagattgactttattggattgtttttattttttaaaaatatacaacattcaaatggtaaaaaagagtatgcagagaaaaaaaccgttcctctctctccagtccttagaacctcatttcctctccccaccccagcaagagacaattgctactattgtaaaaatgcttccagtggtatcttatgcatccataagcatacatgcatgtatagatgtgaaatgcttacatgcatcttctttacccactgtatgatagcatgctatacatgccactgtgtaaatttccacatttatcttaaaagtcattctctctcatttcttttatccatgattctgctgaccacatcagtggcagagaacattgcatcttccccatcctctgggtcccttctcttgacttacgggttttgcctgcaggtgtatctccaggtgtggccacagagagacagactccatgctttaaaataataggaaagataggaatttccctttcttacaagttttcccattctgcccggtcacgaactggtctcaagggcaggcagatgctgtccttttcatgtctgtctgttggggtctaagtaggaaatctctttagtatttaaggcattgagtatttaatgcaggaaatggtcgcacagtgatgagccaaaacaagagactgggcactcagccactgtccctgcagctgcaaccacccctaagcttgaggggcaggggcaggaggtggcaggacagaaacgaggaccaggtcgcccagcagagcttggcactgtttgggcctgttcagagggagctggagccatggaccaggagcagtttctagtagggacctagccaagcaaagatggggatttcaccagagatgggaatttcaccaaagatgggcttcacccatcccaacctctacctccaaactcagaccagcacctcccatcaggcaaactcagaccagcacctgccatcaggcaaactcagaccagcacctgccatcaggtaaactcagaccagcacctgccatcaggcaaactcagaccagcacctgccatcaggcaaactcagaccagcacctgccatcaggcaaactcagaccagcacctcccatcaggcaaactcagaccagctcctcccatcaggcaaactcagaccagcacctgccatcaggcaaactcagaccagcacctcccatcaggcaaactcagaccagcacctgccatcaggcaaactcagaccagcacctcccatcaggcaaactcagaccagcacctgccatcaggcaaactcagaccagcacctcccatcaggcaaactcagaccagcacctgccatcaggcaaactcagaccagcacctgccatcaggcaaacttatccagcagctgacagtcacaggaactaggggaacaacacctgctttggtgcagagaagagcaggagaagagtaagaaatgcagctgagggaaacagcccagggccccacgtgcaatctccacagtgccgggtaaggcctgttaatgtgggacttgatttaaaaagaagggatggacatctgagacagggagggggcacactcagccccccgggaccggatccctcccttctcatgctcccttgagctcaccttctaaggagcagccccaacaagcaggcctgatggcaggactggagttagaagcagtctttcctcctcttcctgtgccaactgaggagactggtgggccccagagaatacgtagatttagggtacagctgagccaggccaggaaaacttttcctacctctgcggcatgcctattgctcatgcttcaaaatgttctaaagcgtttccgaatcctgcaggctggaatgggtgtttttcccgcttcactgtgcatattctctgttcttacttcatttatctttcctccttgtccttaaatatatgaatcttggctttctgtcaccctggctgttgtacccctcttgggggcagggaaggttctagcatttgaaaatagtgatagcttttacaggtttagccaatggtggaatggatttgacaggctttcagagtcttccctcacagcgagggcccattactaggacctgaggagctccttgtacccccatccaacaacagagttgagagttctacatctggagaaggaggagcatgagccttggtctccatatacttatgagacacatctagaagcttcatctactactggctgaagaaacaagtttgcaccttgcaactcctgtaaagatatttggtggatttatcacccttgaacgttctgttgaacctcttttttcctttctttctttttttttttttttgagacagggtcatactctgttgcccaggctggagtgcagtggcacaataacggcttacagcagcagcacaatcacagctacggcagtgtcaactttccaggctccagcaatcctcccacttcagcctcctgaatagctgggagcgcaggcacacaccaccatactaggctaatttttgtattttcggtagagatggggttatgccctattgctcaggctggtcttgagctcctgagctcaagcaatccacccgcctcggcctcccaaagtgctgggattacaggcgtgaaccactacgcccggcttggggaacctcttttggcctgcttatcatgtgggacgactgagattgactagccagtctttttgttcctgggtcaattcctatttttttcaggacaagctggtttactttcagtttctttgtattcagaaactgggtttgtttctaatttttgttgctaatttttgtattttttgtagagacagggtctcaccatgttgtccagctggccttaaactctaactttctctgtttagactgtgcatatcagtactcaacagaacaaaatacctatacgtaagctctcctatacttactaaaatcgcctaaatcacttttattctattcacccttcttttgtgttaaaacaactacaaccatagtctggtgcgccttatttaagtcttttgaatataaaaaaaaaaccattgcttatcacaaacaatttatgtcaattgactacattgctatggttactattattattgattcataaattgttacaagttgcttctttgtcctcttagcaccgatgatattctcaaaattatctttgttctggtaataataatatgttacaagctaatgccgactcttctctatccccaagatatgaaatcagtcatctctgacgagtcctggttttttttttttaagttttattattattattattattggagactgggcctcactctgtcgcctaggctggagtgcagtgacgagatcttggctcacagcagcctcaacttcccgggctcaggcaatcctcccaccttagcctcccaagtcgctgggaccacagatgtgtgccaccacgctaggctaatttttgtattttttgtagagacagggtctcaccatgttgcctagctggtctcaaactcctgggctcaagtgattcgtctgccttgacctcccaaattgctgggaatacaggcatgagtcaccacactcagcctcctggatttatttatggtggagaatagtatccaagggaaaaatttgacgctaagaatgagtacatgtgagtcttggctttagcttctgttggtcaaattttagtatcagaattggaaaaaaatgtgtgtaagggaatttattttttttcactttaacagattatattggtggccctattcttttaacggtatgaaggtttcgttctatcaaaggcattctattatattgatgtatttctatccaaagatttaaaatacaaaggcacctccgactccagctgtgggccatcagcctcagtaagatgtctagactccacagtgaacaggttgtcaccggtgccaggcgtgctctgtgggtgcaatactgtaccaggggctgtaaggagcagagtgacatgtgaaacacggcccctggcctccatggatgtacagatatcatttatgtgttcaaaacaaagggaaaactgtataagccatcatgtaatcagtgcttgatgaaactggaagtgcacacaatgggtggtaaaggagttgagagaccagtgtgtggacgaggaaaggcctccaaagcaggagagtttgagccaccttggaaatggtggaatttcagacagatgccaaagtgcattttgatccttgggaaccacctcacagacagccctaagcagcttgcagacacacgagcattaggatgaaactgctggcagaagaatgacactggagacattggctcacagtgagggcaacatggcgtcccagaacaagagaagatagggttgtgttttcgaaatgacagtgagttagaacattaccccaaggtcaggaacacactccatgcagttaatagaaggaaacaacttagagtccagcagaggctaggcatccttaaagctacctccgttcacttacagaaacaacagaagccttgatcctgcttccagttgggctggcttaccccttctccatgcaccaccaaacatccctgcatcatcaccagccctgtgcctctatcttgctctgctctgcccgggaaaatcctagctctgatatcacctgctcctacccttcccaaccttactaaaagaattgatctccctcctccttggtgttctcatagcatttcatacaaaacctgttagaccacctgtcttgcatgttattattgcctctttgcttgtttgcttctctgtagacaatgactatctgaggggatgtgtcttatttatttatttatttatttattttgagatggagtctccctctgttgcccaggctggagtgcagtggcgcgatcttggctcactgcaagctccgcctcccgggttcccgccattctcctgcctcagcctccggagtagctgggactacaggcgcctgccaccacgcccggctaatgttttgtatttttagtagagacggggtttcacggtgttagccaggatggtcttgatctcctgacctcgtgatccgcccgcctcggcctcccaaagcgctgggattacaggcgtgagccaccgcgcccggccgggatgtgtcttatttttatttgacatcagagtacctaagcatagtgtttgagcctcactgtctattcaacagaaatctgttggacaaattagtaaatgaatgagtaaatacatgaatacatgtctcagactaactcttgtatgacccagtggctccatgggattggagtatgctttggatttggttatttcttgatctttatcttgatgaagcatgattcgccaggaccttggttgatatgtgttagatttgcaaagctaacatgtaaaatgtcattccaaattaatagaacagatcttagttactcttgctttccgttgtagtatttctagccaagtcttggcttgataagaagagggagacttaggaagccagcggaaaatcacttgatttaatattccaggccacgatttgacaactgtttaaaggttataacttggagacttagaaagttgatgactaggctgttttagggacagactcttttaatgactactaaagcactgtgcttcaagatggctttcaaatctgacctgaactgagatagtattcactgcactgaagtccacaattgaaagcagaaaaattcagaggtttcatatatccctctaggatcctgggcattctcaagttatatatatatatatatatatatatatatatatatatatatatttttttttttttttttttttttttttgagatagagtctcgctcactctgttgtccaggctgaagtgcagtggcgtgatctcccggattcaagtgattcttgtgcttcaactcccaaatagctgggactacaggcatatgctatcatgcctggctaatttttgtatttttattagagatgggagtttcaccgtgttggccaggctggtctcgaactcctgacctcaagtgatccacctgcctcagcctccgaaagtgctgggatgacaggtgtgagccactgtacccggcctgatttatatatttggatgtgttaaattatgtgtctatgggtagaatatctttggacagcatttgaggtctttgaaggtctttggagatgggggaatctgggaaaagagcagtggcccagctgccacctgtggggaggtggtgtcaaggacggggaggtggtggcaaggagggtgatggtggcaagctgctactttctggggtctggtgaaacactcctgtccatcatctgtttatagatgtgcttcttagctctggaacaactttttctgatatttttgctgattgataaagacctttttgcctttttgttacttttgtttgcaacgttaacatagtagccactgaagttctgtggctcaagaacaaaaactgttagaaaacaagaaaacagaaggccattccaggaagcaaaaattttcagtagaaactttcagaaaataagaatcatccattcattgcttatttttctctttatcctatttttctaattctgattttaaaaattctgacaatgtggctgggcgtggcagctcatgcctgtaatcccagcactttgggaggccgaggtgggcagatcatgaggtcaggagttcaagaccaatcatgcaaacatggtgaaaccccgtctctactaaaaatacaaaaattagccaggcgtgatggccagcacctgtaatcccagctacttgggaggctgaggcaggagaattgcttgaacccgggaggcggaggttgcggcgagccgagattgtgccactgcactccagcctggcaacacagcaagactccatctcaaacaaaacaaaacaaaacaaattcagacaatgcaaaagtgtacaaagaggaaaggaagagcatcttttagtattttcctgcccagacacaattgtcatcagccttttgatgattactttccccagacctttttatgcttaaacatgtgcagatttatctttatctatatacataaaatatatgtagagaatcaaggtatatatgctattttgcaatcttcacatatgcatgtatatgtacatatatacatacaaatatttcattttatgaatgtgaaataatgtgctaaaccactgttgttttgagggacattttgattgctttcagtatttcactattacaaagaatgctgcaaagaatatccttggccatatatctttgtgctcttgtcagattctttttttaggataaatcctcaggagtgataaagttggattaggaggtgtggctgtgtaaatttttacgtgcttttcaaattgtcctccagaaaggctagccaatttgtacccttgccaacaatcaatgagagtgcccattgcatcagcccctcaccaacatgagtattgtcagggtttttcacatttatcaatctggcaattgacaaatgataccttaatttactttttgggggagttggcaataaagtgcagaatcttttcttgtaataattcacctctttccttccttccttctttcctgcttgtctttttgtatcctttgctcattttctactgtgtgtattgggggagtgagtttcacttttattgggtgggtgcaaaagtaattgcggtttttgctattagtttcaatggtaaaaaccgtgactacttctgcaccaacctagtatttttataatttgcagttctttgtattaaccttttgttgttcccatatgtggcaaatagtttccttagctttattttcaatcttttttatgattttacatttgctttatgaaagtgtttgagttttacgtggtcatgtctatcaatctttctggttctgcttcccaagttttctaatatccagtacttagaaagctcatccccattccgagaacatacaaatgttgacttatattgtctttaggactttttaatgtttctttttttatgtatatttaagtgttgggaatttctaaaaatatttttttaaaatataggtaaaattttatttatttctaaacgccagttgtccataaatcatttgttgcactttcgtgtcttgatgtgaaatgttcctaaattttttgaatggaaatttaatattcatttaatttctggactaacttttccattgacccaattgctactcctataccatactgctgccatgattggagatttatagcacattttaataactaggagggcaaatcttcctcactagactttgttttgcccttctttttctaaagtcagtttggatttttaatgtgattgcatttaattaaaattatattttaaaaatacccatctgtcccaaaataaaataatcttatttattcaaatcttatttaaggacattagcaaaattttaagaaacattatttccttcattggaatctttctacttcttatgaaatctatatgaagaactgtgaagggtctgagattttaccctctctgacagcaaacaaattaaccggccctggcgtcacagatgctggcagaagacagatagctcctaggtcagagatacagcaagtcacacaacttcatgttctcatgggcttcccttgttcaagctccatggtggatactgcacatgcagtgggtttgtgtctcagttgaggaactctaagctcaggaaaccctagcggggtcagagaaagcttccttgagttaactgaggaaggagaggcatggactagagggggaagaaagagcattccaggcaaagggaactgcaaaagcaaaggccctgtggtgggtgcaagtgtgtcaacaactataaataacaggaaaaaaatgccaccatggtgactccattatcttctggctgatggtgctgaagtgaactggcctgtttattctttccactgtaaatgacctgtttatcttgcctaaatgcttgtagatgttttcatgtgagtgctgatttgttgttcttttctttctttctttctttttttttttttagatggagtctcactctgtcacacccaggttggagtgcagtggcgcgatcttagctcactgcaacctgcctcagcctccctagtagttggaattataggcgcctgccaccatgcccagctaattttttgtgtttttagtagagacggggtttccccatgttggccaggctggtctggaactcctgacctcaggtgatctgcccgcctcagcctcccagtgtgctgggattacaggtgtgagccaccgcacccagcctgatcatgggttttctcttgttgacttcggatcttgatgttactggataggttgtctttactcctcagtaaagacaaagtagtaaagcagagaagcatgtcccaaactaggaaaaaaataattcctgagtttaaagtctataaaaataataaggaagaagcagaaacttgatgagaatagttcaaaattagactcggaccaactttcacatagcgaaaatcttattaaataaatttggtggttcttcaatgtttttagtagcctctttttggaaaacaaatattttggatatttattggcactaagtctagaagtaggatgatttttttgttcacatgttaatgagcttatagtccctcatcctaactgattgactttaagatacctttagttatatcacctgtcattattttatgtactactaagatagaaaaaaaaatgctccctatggaattctgacacactgtagggtgcaccctgatttcagagatgttaatatatgaaaaatatgcttcttagaatcaatgagaccgagtatttttcttaaactcacaagaacagaaaaaaaattcgtatccagaacaccttgtctgtctaacaatgcattgttttctgtttaacagtgcattcaaaaaataaatttatactttaaaattctatttactacatatggtatttccaagaacaatcaagattattgatagaatactgctcatattcagaaaattaacaaagtgaccttaaatctataaaggatacccaatatttcctatcatgtttttaagaacttccactattttatattttctgtcctgagcagagcaatcttgtccttgtagacaaggcccaggccagggtgtagggactgtgcccatcgtcttccccaacttcttctacaagcttttgggcaaaagcctctcatttccactgtaaggtaccactaatccttaaaaatgaattttatcacccctgaatcaaagtctaaagttctgcctcactcatcacattcctgaacattccaggaagtctgacccctgaactcatgataccactatgttctttgagtcaagtttgatcaactacctcttgcttcaaggtttaggcaattctacctgagaagcttattctttttttttttttttttttttgagacagtcttgctctgtcacccaggcttgtatgtagtggtgcgatctcagctcactgcaacctctgcctccctggttcaagcaattctcctgcctcagcctcccgagtagctgggattacaggcatgggcagccaagcctggctaatttttgtattcttagtagagatggggtttcgctatgttgtccaggctagtctcgaactcctaggctcaagtgatccagcagcctcagcttcccaaagtgctgggattacaggcatgagtcagtgtgcctggtgtgcccggccttattattcatatttttagtgccatgctaagattattgtagtgtgtgtggtatctgtacaaaggattgtacatgctgaacaattacccatagtcctgccatctttgccttggtggcattttagcatgtctgcttccactttttgaccatacacattttttgcatagttgaggtcattttaatgtgcgatgctttttttattcaacatcatgttgttcaaaaagtgtcattaaaggcttttaactagttgattgttttattctgcagatattaagtattctcctattgcttattatttgggttgcatgcattttaattttgcaattctaaatcatgtgaaaatgaataaatcatgttaaaatgaacatacctgtatgtaaatctctgtccacattttgatacaaggacatcatcaactttcatacaattgatttgatcaatttaaatttcttaaatttctttcaagagaaaaagaggtcatgacaatttataactcaagcaaagagataggagtgaacatgagagagtggctttgtttatttaatattattgttacaacagttcaaagttgaactaactgaggaaactgagacacagacaaagtcattttgttgctggtgacattatcagctgtgtttggagctgggaaactattgttttctttgcctagccagtatcttccctacttcacttgccccatggaaattcaacatccttgaaattacaccagttaactcccccagaggcccaacagcatcgtaaatgcatctagtggtacctagctccttcatatttggtcttcccctccaataagtggtaggtatcgccaaaatcaccagacaggatcatgtttgccttgcaaaccaaacaaacccttctgtttttgttttgctttgtgtctggactaattcttagcacctcttctgcctgtgagcgatttgtcacctcattctgtaagactggcaccagcagaaatgcagtctcaaaggatcccggggagaaagcgaggccgaccctcacttcactccacgcctatgaagatggcagttcataacctttattctgcttcagctggctctttaccagcagtgaagatcccaaagaaaagagggcggaaacccgggtacaaggtacggctccatcatctccttctccaaagtggtattgggctggggcatgggtacttggtcagacctgcactgcaaaatgccactagaggttgggagcttggtagagacaggatgagaaataagcctccctcggtgaagtatgtgacggatgaggtctcactgttacaacatggccataatgcatgctgtcgtgtgcatttttccaagtggagaaagcaaattacaccagatggggaaagttgtgagtgagtagattttagggtcatcgctaaacacacattattaaaccttgcatctaaattagtgtttcagacactgagctttcccctgactgttcctactagggtaaatcttgaagccactttccagaactcatttgtcatttattttagcaggagcagatgatgttcctgagacatttaaattaataatgtgagcaggccagtgtcaaaggacatgggaaagtcttcccaaacagaacctcaacacagagagtcataatgaaaattcagcgtgttaattcctagtttcccacttctaaaaggtgctgatgtcgagtttggctacaaggaggcatatcaggcaaaattacattcctgtgacccttataagaattagcagtgatttggagaggctggggtggagaacaaatcctctgatgtaaccacaatcataaaccaactcaaactcaagggagggctgcttctcttagttgtttttgaataggctattagagaggaaaaaaatgttacacttgttcttcacaaacctttcgggcattagaaaatgagcttcaggagttttcctttatctatttttcgtgaaataaaggcttatgtttccatcttgagacctgaatactgaaaccagaatgcaaattggcaattaactcccatatatttaggaaaatatatggaaattatttcaggtcagtagaaagagcttctggaagagttggtaatgaattcaatctttatccctttggttctccatagttcttccaaatgctggaaaataaaatcagtaggtgggaggaaggctcctcaaagttattgtggggtcattggttttagtaaaagaagcttttactcagctatctcatgaggtaaagtcttctctcactggttgttcttctaacaacaagaatctcctttctttcatgtgcatgccagctttagaactctctcttaagctggcgtagggccagtcttacccactcactactgtgcagttgttggcttctgggaattgcatctggagggctggagcagggcagcctttctgtttatagatgcatcgagcaaatccaggattcgaagaaacatactgaagacttctgtctcctatttggcctttctcctactctcctggaggctgtgacccaagaatgaaaattaccaacagactcagcattcctggggccaggaagaatggaaaattcattccatgaaaggaacctgatttcacaattttcctgtctcctcaaaagggtagttttcagcactcatgacactcagagacaactcaggtcaggaagaaatctttgggttggttggctgataatacagagctctgcccaaagcaggcagtcttttcccatttcctcatagagtttctcttatgggaagtaggccactcctcttccttgaatctacttcccatatatttaggaaaatgtatggaaattattttaggccaacaactcccagaaagcttcccaagctatgggcataatgttctagaataatagttccaaaccgggtgccattctgcgtgaagttcccacccatccgtggtgacataagaaaaacaagagccatttgaaagtcttcatgaagttcaaatgattcctcttaaaggatgatcctttattctgaaatatctgcttcctactatcttggtggtaaaatgttttgttttattaaatgttgtatgttaataggatttagtaatttttaaaaatgttcttagttggcaaaataaagttggcaacctattaatctccccagttttattttgacaatttcctagacctggacaccccattttaccattaatgacaggactttaattgtgaagaagccagctcagaaattgtacagtttcactccatttgccaaatgtcaactaatttgatgattttaactctctgggacacagctggggagccagaaattgttaaaaaaaaccctgaccaagcaaagtaagatattacttggtctaacttttaaagatcttgtatttcattgctaagaaaatgcttccaggccttccatcagaatttgtttacattttttgttaacatgtttcttgcaagctcaattatagctggttagtagccttagatttggaggggaaggtatttttggggagaagactccatacacagctggacactggagaataataacttttgtagtgagatgataatatactaacaagagagaaataatacagtaatgtcaatcttataaaataagatataacataattttattatatcaataataacattattataatgatatattgatgttaataatagcatcgtaataaaatcatatgtttctgagcctttggcaggctcttctccaggagattctgaggacgcctcattgtgttgactgtataacaagtctatgctggttgacatttgtcacttcttgcctgatgcttccccagctgctctgtcaatcacctctgtgcatatgtgggaactctctctggtccaagacctgccttcaagactcaagaacatgtaacacaggctgtgacacttaactgcttcctgaggataacatgagtgaattgcaggcagataagggagggttacactggcggtcaggtgtcaatgctctagagttcataggtcaggccccctcccagggcccatctggccatctccctcttggccccaggctcgcagccacatgactggggcagactcacagctggaagagtatcacattttatggtgctactgcccccttcttgccctggtcaaagaaagcaaaacctctgaacgtcgtatgttctatgaagagccatactctgactaccatgaagatagccttgttcatgatcaaacagagcatttacctctccatttgaaacatctgctattggttgaggtccttagttcagagactccccaagatcaataggtagattttccttacatttcatgaccaaaaagaccaccaaggtatttttaaagaaacagagggggctgcagtaagaacaaatcctagtttccattctgttgagccagctggttataatgcctctaatagtgggatttcaatcttctgtgtcttcctggttgggatttttatttaagcagaagaaacaagttctgggttttgaaaagtagttgtttgtccccaataaaaggtaataataatactaatagcaatcataatcatacaaaatatttattgaatacttttacgtttgaggctccgggtggaagcattttgtgtgtatttcttatttgatccttgatagtttgagagtgagaggaaagaagtgtagaaaaactgcaggacttaggcatgaatgaaccaagcccacaggaggcagcagccctccgctcctcagccatcgccttgtattattgttcagaatagcaattatgcttctcaagtcaaaaaagagaaaacgatgttctgtctgctctgtttaatgagttaagaaaggtgtggcatgttctagaaaggctatcatccttgaaatgttaaaaacaaaatagttaaaatgacttaaaatgttggtaattgtgtcattcgggatacaaattcagctgctgtaacaagggctaaataacagtgactttaaagaagaaagaagctaatttctttctcatgttaaagtgtgggaaggctggtatgatggctccatggggtggggacccaggctgttcctgtattgttgcttgtcacctaggctggagtgcagtggcaccctcacagctcactgtagccttgacttcccaggtcaagcaattgagttgtggggaatacagatgcacgccaccatgcctggctacttttttacttttttttttttttttttgtacagatgaagtctcaccgagttccccaggctggtcttgaatgcctgagctcgagagatcctctcgcctcagcctcccaaagcgctggggttacaggcatgagccaccgggcccagccagttctgccattgttaacacacagtttctacctcctggtctgacgtggctgctccaggtcccactgtcccactgttttagacaacagaatgggaacacagagctagcagagggcacgcctgtctccttgaagggctcaattctcgaagtcacacatccattacaatttgcattcctcaggccagcagttagtcactcagccacccgtagctacaagggaagctaggaaacgcagtgctggttaccgagtgatcagctaaaatttaggaagtccactattaaagggagaaaggagaatggatatttgggaacagctagcagcttctgttgagtacctaaaggacaggcttctgttaactggaaaattcgcttgctgaagtaattttctaattaatatgggtaaatgcaatgttttgtaatccttcagtacgttggattgttttgttctctcttcctttttctttttctgaaaaaataggtgttctttgccctgtgtaacaagagagtcaagttcacaaaaatctcaagcaagagaacttaagtagaaacttgagtattcaaacttaagtagaaagggttttcgtttgtttgtctcaacatttgtttaaagcctctttctaaatgtgttttcattagaactgttgaattggcatcacgggttctgtggcagtccagatgttgtattgcttggagttgtattacagacattaaagatagcttaataggccgggtgtggtggctcaagtctgtaatcccagcactttgggaggccgaggtggatggatcacgaggtcaggagatcgagaccaccctggacaacatggtgaaaccccgtctgtactaaaaatacaaaaactagctgggcatggtggcgcgtgtcagtaatcccagctattcatgtcaggagaggctgaggcaggagaattgcttgaaccagggagtcggaggttgcagtgagccgagatcatgccactgcgctccagcctagtgacagggcgagattctgtctcaaaaaaaaaaaaaaaaaaaatagcttaatagtacagatgggaagagtggctacctaatacccttcctgtgtctctttccagggtccctctcttgctgatggtaggtatggattgctacctgtggtctgtgggggaaattatgacacagtcacaaggcaggggccatttcctcgggttgaacattgagcagcacctagggtagggactgtatcccctgagtcttctgttgcctaccccccagtgcccatgcacccagggctggaacaggggtcaggggtgaggctcagaggtggatctgaggcagtggtaggctggtaaatgttttacagctggcattctgagcatagctctgacatgaatgttagttgttattttcactcatgttaaagagtaaaatgagcgtaaacaatgaggtcttatgtcagagctttccttgtttgtcaagactgagaatgacttccttgctaaattcgataatagttttgttttttatctggacagggttttattatactatgttgcccaggctggagtgcagtggttattcaggagcgagatcatagctcactgcagccttgaaccctttttttttttttttttgagacggagtctcacattattgcccaggctggactgtagtggcgcaatttcggctcactgcaacctccgcctcccaggttcaagcaattcttctgcctcagcctcctgagtagctgggattacaggtgtgcaccaccacgcccggctaatttttgtatttttagtagagacgggatttcaccatgttgaccagcctggtcttgaactcctgacctcaggtgatccgcccacctgggcctcccaaagtgctaggattacaggtgtgaggactgcacccggccaaccttgacctcttggcctcaagcagtccttctgcctcagcctcccaaacagctgggactacaggcatgtgccaccatgcctggattggataatagtttttgaagacaaaaaagaatttaagtattttgtgctattcacattgtaacagctatagacatgacatgcttttaagtttaatctgcatttttagtattttctccatcattttttaaaatctataaatcaacacagctctaattcacagcatttcccagattctaaggtgtaaatattcccttcatggccaatattgagccaccaatgaattcacatccctgaatatggatttgggaaaagatgtacagcagcaaacccttggaaatacagatggagtcgtaaaattagcaagtgatgagttgtcagtatttattacttttgtttttaataaactttttatttatttgtttgtttgtttggtttcactaagtaaaaaacgacttgtgaatggggcagcctcctgagccagagtaggttcagagactccctacaaactttattaacttgtaagtgtatatactgtaatttttatttttaaaatttttttgacacagagtctcactctgttgcccaggctggagtgcaatggcgcaatctcagctcactgcaacctctgcctcataatttttaataagggctgtgtttaacaatccacttgcaatactcctgaagatgtaacaatcctctctcatggactagtacaagccggctccagcccctgggggatcagagttctgctgagctcaggatgcctgtacccggatggtccatgtccccattctcatcagctgggctgacagttttgatcccattgccactgatgcacagaacttgaccccctcaccagtttctgtaagacacccaatcacaccaagcagttcttgacatgtatggtttctgctaaagattgttggtgttgcaggccatagtggacagcttctgttaaatgactgtcatggatagatgtttttctgaatcctactttatttaaggatagtgtattagtctgttttcaccctgctgataaagagatacctgaaactgggtaatttataaagaaaaagaggtttaatggactcacagttccacatggccagggaggcctcacagtcatggtggaaagcgaaaagtatgtcttatatggtggcagataagagagaacgagagtcaagcgaaaggggtttcccgttgtaaaaccatcagatctggtgagacttattcactaccacaagaacagtatgggggaaattacccccatgattcagttacctcccaccgggtccctcccacaacacgtgggaattatgggagctacaattcaagatgagatttgggtggggacacagtgaaaccatatcagatagaacttttttgtttttctttttcttccttctctctcctggtacccatggaatactggcttcattgtctcctctcttgggttccttcggtgaggaggaaatgaaaccattccttcccacctcaggcagagcaggagccctccccacctcatcaccagtctcagcccctctctggatacagaccagcatctgaacccataggatccgaatcctgtcccacatcatttgcatctctgaaaggcacaagaaagggtgggccattccactcccacctccaagcatccccttctgctttcactgtgatgaaggcaatctattttatttgggtaattttactttcctaagaaagtgttagtgcaatgattatttaattagaatcccagatttgaccaaagcaggcctcaaggccaaaaggtaccagcccttccatctcttgggtgtttaacatctcccccaagtgcagaaggaaaaatgtacgagtagacccagttacaggctgactcctaggaatggaattagatcactggccacaagcttcttgttattggaaccaatttgcatttccagcaggcaagtttttagactaaagtctgtggttaaacatggtgagttattcaatgtcttctaactttgttcccctggagcatctcctcagaaccccaagggagttttgtatgaagaaagaatgtgaattccaaggagaaatgtgtccacaaggaaaactatgggcagggacatggacaaagctagtcttccttaaatagaggtggggaggtgtcttagctcgggctgccataccaaaataccatagcctgggtggcttcaatatggaaattaattttgtcatcgttctggaggatttaaagtccaagatcaaggtgcagcaggattcagttctgtgagggctgtcttggcaatggctgccttcttactgtgtcctcacatggtggagacagcgagcaagctctggcctctcttcctcttcttttaagaacactaatcccggccaggcgcagtggctcacacctgtagccccggcattttgggaggcagaggcaggcagatcacttgaggtcaggagtttgagactagcctagccaatgtggtgaaaccctgtctctactaaaaacacaaaaattagctgggtgtggtggcgggtgcccataatcccagctacttgggaggctgaggcaggagaatcgcttgaacctgggagatggaggttgcagtgagccgggatggtgccactgcactccaacctggatgacagagcgaggctctgtctcaaaaacatacaaaaaaaaaaaaaacaagaacatgaatctcttcatggggcataccgtcatgacctcatgtaaacctaagtacctcccaaaggctccacctccaactaccttcacattgggtgttagtacttcagtgtatgaattttggagggtacacaaacattcagtccataacagaaaggaagaaaaggaaggagaacataattaaaaaaacaaaaatctaggctgggcattgtggctcatgcttgtaattccagcactttgggaggctaggcagcaggatcacctgagcctaagagttcgagaccagcctgggcaacatagcactaccctgcttctacaaaaaataaatgaattagccaactgtgatggtgcacacctgtagtcctagctacttgggagactgaggtggaaggattgcttgagcccaggaactcaaagctgaagtaagtcatgatcgtgtcactgcactatagcttgagtgacagagtgagaccttgaacaaaaaaaaaaaaaaaaaaaaaagagtgcatttattttctagggctgatataacaaaacacaacaaactagataacaaacaacagaaatttattgtctcagagttttggaagccacaagttcatgatcaaggtgtaggtagtgttggttctttctgagcctgtaaggaagaatctgttccatgtctctctcccagcttctgatagtgtcaggctttccttggcttgtagacagcttactccccatgtcttcccatcatcttccatctgtgtgtgtctgcctctccgtccatatttccattttgtataaggataccagccacattggattaagacccagacttatgacctcatcttaactcaaccatctgcaaagactgtattttcaaataaggtcacattcacaggtactgagagttgagatttcaatatgtgtttgagggacacatttcaacccataacatctaatatgacaatctttgtcttttaattaggtgtttagtccaatcgtatttttaaaaattactaataaatttgggcttaaatctatactgattttttgtattctatatattccttttacctgtcttttctgccttccttttgagttattttttattatttaattttttctttcccattcattggaagtcaagcgttctgttttctgttgtattaatggctactctaaaaattacagcatgcttacttattagagttgtctaaagttaaccatacttttgcttcttcctaaataatacaaggactttagtacactttaattccatttatattctgtcccccacacttatatattattgttgccatgcattttaattttttcttttttagcccctccagtcatcattattattgtttgatacagtcattttcatttaaattcacctgattatttaccacctctaaaaaattcttcatttttgtatatcagaccttccacctgggttccttgtcattttgcctgaagtaaaatgaaaagaagctcctctaatataggtcctgtagtgataaactctcagtttttgttgtttacaagtatctttattttaccttcacttttgaaaaaaaaaagacttttttttctgggtgtagaagtctagattgtcagttattcccttgaagcacatagacgatattatattttgccgggtacggtggctcatgcctgtaatcctagcactttgggaggccaaggcgggcagatcacttgaggtcaggagtttgagaccagcctggccaacatgatgcaaccccatttctactaaaaatatgaaaattcgcttggcatggtagcgcctgcctgtaatccaagctacttgggaggctgaggcaggagaatcacttgaacccaggaagcggtggttgcagtaagccgagattgcgccattgcactccagcacgggtgacagagcaagactctgtctaaaaaaaaaaaaacaccaaagatattatatttatattctggggttcattgttgcagagaattcaactgcttttctagcttattagggtgtttcttggaaagtaatctgtatttttaattttaagatttttctctatgtctttggcgttttataatttcacttcattgtgttgacgtgtggatttatattttattcatcctatttaggatttgctgagcttcctgaatctgtaagttgaaatctttcatcagttctggaaaattctctgctattatctcttcaaatataatctcctttccattctccatattcttttcttctgaaactcttatgtttcaaacttctcatattctccatttcttttaacctcttttccatagttttaatctattggtttctgtgctgctttctgggtaatttcttctgacatatcttcgagctcattaattttctatttagctatgtttacaatgctgttaagtctatccatttacttcttaattttagttactgtgtttcccacttataaaaattcaatttgcttctttttcaaatttactgtttttttaaatcattttttgttccccagatatattttcaagcttgtcctttatatctttatacatagtatcatagttgtttttataatctaagttcgataattgaaatatcttaatatttggggggcttcattgctgtgtgtttttattgcttattctttctttagttatttgcttccttgtgtgcttgggtattttggactgttattcatcaaccttgaaaaattatttttgagacttctttgaaacctttctccagagatgatgtgttttcttttgcctttccagtcacctgagacactgtcatattgagtaattttttaattaaattcatagcctgaggttttcttgatcacccaagttctgtgaatttgggatgcaaatatatgtgaggtccagcttctggtaatatcttctcagagattctgcaaatcccctccctcagtgtcaaggcaacttttcttgtagccaggtaggggtgggagaagatgggacaagtctacagctggagtgtctttattgtagctcttagggtaagccctgggcttcatagcaatgcccatggcccagattacacctatatgttggcctggttattctttatatatgtcaattcctccatacttttaatcatttttgcatttattcattatttgtagtagtttcaattgactgatcctaataaccagttttccatcttaccagaaacaggacttcaaataatttagaatgctacatttcttctaattaacattccaaatatggtgctaacactggttttgactcaaattctttaatgtgttcaaaaataatctaatgaaagttacacacacaacattatgagttgggaagagcttagaaaccaacaactgtaacccatttaaaggctttggaagatgaagcttagaggagctgagtgagttgctcagagtcccgtgcgagttggcagtagaaccaggactagcgtgtcatttgttatctctaagacctgtattcttgccactgccctgcagtgcagtggcaatgcgtagttgactgaaattatgtccatttccccgatgaggaaatatggattatttccttttcttcatgccctctcccaaagttctgcacagaacttttgctgtctcattctgaaggtttattactttagtattacagaaggaatgttttgaaacttagagacaaagccagtattattgcccaataataagtctagttagttaaccaaatcagcagtaagtaaatacatgctagtgttttataactaacataataaaaatgtactattaaagcaaagattttgtgaatagatgtagatattgtcctagattttgtgctttctctcacccgtcacttcagttccatctcaaagtacaccctgaatccaatcaattctttccacctccctacttccaccctagtttagccaccagtgtctctcagctagaccacgtgatacctccttagtagtgttcttttctgcactttgcctccacttccccatccattctgcctaacagcagccgtatgtatgtatgtatgtatgtatgtatgtatgtatgtattttgagacagggtctggctctgtctcccagattggagtgcagtggcgcaatctcggcttactgcaacctccgcctcccaggctcaagccgtcttcctacctcagcctcctaagtagctgggactaaggtgcatgccaccacacccagccagtttttttttgttttgttttgtttcaggtttttttttttttttttttgtattttttgtagagatggagttttgccattttgtccagacaggtcttgaactcatgagctcaagtgaccctcttgcttcagtctcctaaagtgctgggataacagcactcagagattctgatgtgagccactgggcctagcaccatatttatttttataaaatgaaaactagcttgtgtgtttccctgcttaaaatcctgtaattatttccatcactcatagaataaaatccaagcttgttatcctgactgtatttgtttccttagggctgctgtaacaaagaactaccaactgggtggctaaaacatcctttctggaggctagaagactgaaatctgggtgtcagcagggccatgctctctttctgaagactccaggggagggtcctttcttgcctcttcctagcttctggtggttgccggctgtttcttggctatcaacacattactccaatctctgcctctgtcgtcacatagcattctctctaaacaggtgtctgtgcctgtatcaagtttttttcatcttataagcacaccagtcattgggttaagaccaaccctaatgcagtatgcactcattttaacttaattacctctgcaaagaccctatgtctaaataaagccaatatttgcaggtacaggggattagaacttgaacctatgtctttttagagagacacaattcaatgcataacgctaagttagaaaactgccattatctcaacctaaccacctaacttgacctcttcttgcaccattctgactcttgcccacagttccaaccactctggtttcttgaagaagccaagctttagaatgtttgcacaagctgttctgtctgcctggaaagctttctccagtcacaacaggctacctctagccactcacatcctgacttcaatgttacccctttataggcctaccctggtcacctagttgcttgcattgagaacaagaagtttatcttccccattcacagctgaatcttcagcacctagaacagttcctggcacatagtaggtgctcaagaagtttttgttgaataaatgtctgtctgattgaatgaatgattttttttcctttttagatttggcttaaatgatgccacttggaaaggataggtattacataagcaacacttaggaaccatttcaagatggattggaagcatgtttcacagaggggatcatctgcgaggtgtgaggaaaaagggtcgatttgcagagatttctgaagatgtgatcccaagagataagcatggaaaatgtagatgggttccaggaaagatgggcagtttcctcctcctgccatcacttcatgaacaagaaacttgggacttatttgcatttttggaatttctaaaagtaacaataataatactaacaccaataatgacaattaacttttattgagttctcactttgcattatgctaaacttctgcatttaattctaactacatccctgtgtgagggctattatctttacagatgaggaaaggcaggctctgagggcctaagtactaagcttcagaatcagcgagtggccacgctggacattcaatccagatccaaagctggtattcctttgcatgtgcccactgctgccctaaacacattttaaaatcttgctttgttggcttaccctctgcggatgtgccagcagcctctatacatcctcatccttccccagccacactctccatcctcagattatccacctcttgctaccagtctgtcaaacaatgtttagttggcatttctgttactgccaaagccagatgtttctagaaaaatccttgagttttatatcaaccgatcctctcccctttagtgtgctcttgaccgcacatctccgtttccccccaaatcccctcccaattctttccagtgatgttctagcaaatgtcttagacaaggtcctcccctaaatgacagctggagccagaaattccccaggcccatattttggttctataaatggaaaagaaagatgagctgattccagattccccagcccccctggtggagactccagctggtagggacactttgccctaccgctttgtcccagcagtattctctaatgaggcaaagcacagaccttgccttggatgaggggtcgccacacctgctgggttgaggttttgaatctcaggtaaaggtggcaactgcactagcatttgggcagggatgttggctttgaaggcccaggattagctcctgtatgtcagagcatggcgtcctgcacagcaagctgcttccagttctgtgctgccaggaagaggcctctcttctctcctcctctccatttacccagtttattctgccacatcctgtttttaatattttgaaaacaaacactattttagaatagttttcagtttacagaagtattgcagagataaaacagagaattctcacgtaccccgcacctgatttccccccatttttaacatctcatattactgtggtatgtttgtctcaactagtgaacccatcataatacttcattattaaataaagtcaatattttattccgatttaattagcttttccctattctattctattccaggatcccatccaagatactacataacatttagttgtcatgtttccttaagctcctctgggctgggaaagttgctcagaatttccttttgtgatgactttggcagttttgaggagtactggttgggtattttgtaaagtgttctgcaatttcagtttgtctaatgtttttctcatgattagactagggttagggggcttggggaagaagatcccagaggtgacgtggcattttcatcatatggtgagagtacatgctagtgacatgacttatcactgatgatgttgaccttgatcctatggttgaagtcttatttatcaggtttctccattgtaaagttatatttccccttcatttccttactgtactctttggaagtactcactgtgcacagcccatccgtaaggagtagggaattgcacttcacctacttgagggaggggtgtctacataaattatttgaaatttttatgcatgggagagttgtttgttctttcccttttatttactgagtcaaccacctatttatgtcagtgtggattcatgaatatttatttcatactttgagttataatccattactacattatttatttgttgttcctcttggtccgaatttggccactgggagctctttcagttggcacctgtgtccctgtaaccagtccccaccattgtgtgtgttttgtttccttagtgttgtcttactttctggcattacaagatgctctaggctcccagtgtgtaatccctaccctaatcctaaaatcagccatgtctgcaaggagttttttttccttacattgaagaatggtgttagaaaccactatatcagaactgtgttttattttgtccatttaaaaaacaaaatagacagctttttttttttttttagaaacctaaggcaacaacaaagacaaatgccctgccagagaacagcttggataggttgcgacaggcagagaacccccccattccactggagagaggtttgtgctgatggactgggccctgcatcacactagagcaaagcttctagccagtgggctcatatccgtgctcttcttttttaggacttttccaaaatcatgggtgactcccttttctacactaggctactttttattctttatattaagcaatgagattgaaatttctgaatgctaagtcaaaagggtatttctactcgtgattttttatctagcgaaggatatttttaaaaagccatatactacccatagttgctcgtgactttttctttcattcaaaagttctagcagttgttttagagactggataaatacaggaggtttccttgcaatcaggcaatttaatctaatccctgtaatttcagttgggcagaaatggacagaagtaacagccaattataattccattacttcatttgaggtgggttcagtgaacagattcctctctagtaattttttttttttttgagacagggtctgtctctgttgcccaggctggagtgtagtggtgtgatcataggtcactgcagcctcgatctcctgggttcaagcaatcctcctgcctcagcctcctgagtagctggaacaacaggcatatgccaccacgcctggctaatttttaaaatttttagtacaaaagagatatcactatgttgtccagcctggtctccagagctcaagcaatcctgccgtcttggcctcccaaagtgctgggattacaggtgtgagccaatacacctgacctctaataaatattaaaatggtgaggaaacattagatgttaaagtcattaggaggtctatatgaacagtaaacagtgtctggatatttacgttttagtcatcatcatcatcgtcatttttctagggaagaatcacaagtatctttgtgtgatttgcttaaagacaagaggaaaaaataatttgccaattccatttttccccagtgagcattattatctctgtgttggcagttaagggctttaagcttgtgaaggaggatttagccagggttatcccagaagtcactgcctgaagtcctcagggactctgtcaccaccagcctctccatcacaagacatggaaagtgggatatcattcctagaaaggcagttaggggacccttggtgcatggcctccataaataggcatggcagccgccaccctcatgacacttggcagatgaggaagtcacaccaaagtcagagtcactgagtcaaaacaggtttatgatctcccattcccatgactgaggtttcttttaaattatgtttataatatttagcagtgtattcctacaggatatgtcctttaattttgaaatgtgacactcagaataagacgaaatctctattgttaattatagtttctgattaatatagaggttcccttgagagcctcaaattcagcacccatttagcactgtgcagccaatgtgcttgctgttgactgatctcatttcacattcatttctgcacatcccagtgccccctcagtgctgctcagcagccgtgctccattccccaggcctcctactctcccagttcatgaccacacccacctcctctgtcctcccactcagcttccatatcttggggaaattggaagccatgggaagagaccttctgcaagctcccacctccacatccacccaccccagcattcaaacctttgtattctgtcttccttcctgttgcaatagatggaaagtatgtgcgtcctcttaggccacggcctccctcatgcactaaatctcctaccctctcacctactcaaagccctttcatgtgagcagttctccacacactcttctgtacaatcaatttttctctctctactggattattttaatcagcattaaaacactattttttctcccatctcaaaaacaaaaaacaaagaatccttaaaattaattttttaaattttgctaaaaaacacacaaaatttaccattatttctaaaatttaccgttattgagtttgccataaaactcaatagtgttaagtatattcacattgtcatgcaaccaatctccagaacattttcatcttgcgaaattcaaactctctacccactaagcaataactccccattcccaccttcccccagttcctggcaactaccattctacttcctgtctctatgcatttgacttttggctattgtaaatagtgttgccgtgaacgtggatgtgaaatatctcttggagactctattttcaattttgggggctacatactcagaaatggaattgctgggtcatatggtaattttatttctaattttttttaaaaactgccatactcttttccatagtggcagcactattttacatttccaccaatagtgctcaagggttccagtttctccacatccttgccaacatttactattttctggggggttttcattttgttattttttgttttgtattttttaatagtatctatcttaacagctaccagaaaggtggtatcgcattgtggggcaaaaaaatattttaatcccactttgttcctttgctatggctagttctctgctcccttttttgacaaaactccttgaaagaggagttgactttacttactgatcctaatgcctctctttccatttttccaatcaggagctaccctattttaaaatctcaactcaaagtataactcctcaattgcatttcccatgccctttgcttctttattttcaccattggctcttatcaccttctaacatactatatcatatacttatttattcatttattgtctccccacccccgctggccattagaatgtcagttccacgagggcaaagatttattcttatcccaattcaacccactgtgccaccacctttcttgttgataaactgctaaatctaatggccactcctagtcttacttgtctaatcagagcacttagcatggttaaccactatctcctccttgaaagaacctttccattcactcccacactcccaccctctcccagttttctttctaccccattgggtgctcttacctgatttcttttgcttgctcctttctcatttctccaggctcttcgtgttggaatcttgcagggctcagtgtttggatccttctcttctccatctacattcacttctctgatgatatcttccattattatggtctgacataccaactctatattcatgattcccaaatgtacatcttcatataggctctcccccagaaccatatactctactagatgcaactgcctagtaatatctccacttggatgtctagcaagtatcttaaactcgacatgtccaaaactcacccctgatcttctctagccccctccactctatcctccttcccttcaaaataaacaacaacaacaaaaaaactactccacctagagccctcctggtgtcaatgcttgaagtcatctttgacttccttctttctctcatataccacattcaatgtgttggtaaattttgttggttccaccttcaaaacatgtccaggatctgtctacttctcatcaccgccactgctatcatcaccacaatccaccctactgtcatctctcagctactgtaggttagtggtcctcccacttttgcttctttcagtcttttctcaataccatagtcagaaagactgttggtcgggcacagtggctcacgcctgtaatcccagcactttgggggccagggcaggcagatcatgaggtcaagagtttgagatcagcctggccaacatggtgaaagcctgtctctactaaaaatacaaaaattagctaggcgtggtggcgggcacctgtaatcccagctactcgggaggctgaggcaggagaatcatttgaacctgggaggcggaggttgcagtgagctgagatggtgccattgcactccagcctgggcaacaagagcgaaactccctctcaaaaaagaaagaaagaaagaaagaaagaaagaaagaaagaaagaaagaaagaaagaaagaaagaaagaaagaaagattgttaaaatgttagtttaaatcctattgtttctctgctcaaaagagttcaagagtaatagctaaaagcctgacagtgtcctgcaaagccctgcccaacctggctttattacctctcctgtctcactctggcctccctacagttgcacaaaccctccaggcatactcctgcctcagaaccttggggcttgatatcgacattgcctggaatattctttccctacacactgtatgacttgctccctcacctccttcaaatcttgggtacaatttcacccaagaaatgcctcaacctccttatttaaaaatgtcagcctaaagtacaactcaattgcacttctcatgccccttccctccttattttcatcatcagcttttattaacatgtaatctactatatcatttacccatttattctgtttattgtctgtctccccccaacagaatatcagttccatgaggccaaagatttttgtatgctttgcttctgctgtttccgtagcagctggaagagtgttgggcatgaaataggctcttggtatatatttgttgaacaaataaatgagtgaatatagaatgactggggaactagcagttcaaatactatttctccatgactattattagtattctatcctaaaaatccaggacgaaagtgaagatatagatgaggactgcacacatgttaacaataggacatacaaccttgctactcgaagtgtggtccatggaccagcagcatcagtggtacctgggagctcatagaaatgcagaatctcctgtcccagaccagaactcctgaatcagaatctgcattttaacaagaccctctagaaggttgattgcaaaaattgaaaagctttggtgttgggcaagggtccccagccttaactgtgtattagaatctcagtatctttaaaaactccggatgtgtgagtctcacttccagagactgacttaatcggtctagagtgaggtctagatataggtcagaggtgaagacagggacatgactgactttcttcattacttttgggtagagagctaagattaaaagcttgtctctgtactagtcttgatataaagagtaacttgttaatatggatatcaacaagtcatcaactattcatcttccccttactccataagagcaaattttaactcctcctttgtggtttcaagtgaaatcatcaaagtggctgctgcccactcttgtgtccacatccagcctagttttgtcaatctgctgcaggaaataaacacagtggtatgtcagcctcttggaggaatggctcctgctctcttttccggcaggacccagtgatttttgtgagcagagagcttgggagacagtgaagggttggtctctggttgggtggatacagggaaagccctgtccacaggattctagggaacacatgggctgcaggctggaaactctcctatcctgcattctgcactcaaagcgttcatggatgccaactcttcacacctctgtgtgctcctgcactcactgcctgacactgtcatttcctgggtggctcttctgaaagggtggaatgagaggtgatctgagtgtgaccccaaatatgaatcctgagcatgaacttgaatctgcagctcaggccccgaaactgcaggatggaaaggtgtggaagcatgatagaagagcaatggttaactgccgtctaggacagaatctggaagagtgtagagagaattgccagattctcattgaccaaatgggctctctcttccagatcaagtctcgggttctcatgactcccttagccctctcacctccgcggagtaccccagagcccgacctcagctccatccctcaggacgcagccacggtccccagcttggcggccccacaggctctcacaggtaggtcagcagaatgaactccaaggctgtgatggtctgtagagaacagggcagctaccatctaattgttactttgtggattaaagagttgttgctgagatggctcaaatgagcgatttagtgtgctagctaggcagcagacaggatgaccagagtctttgagagcaccagtttatatgtcccacagcttggattatttaaaacttggttttcagtgcagcttgggtttaggtggttgctttggttggagggaggtggatgacagcggggcacagggtggccagatgtttcttttaggagctggggtgcgctgatccattgcactgatctaagcctgctcaccttaaacagtgctcttgttcctgtgtttgctcttccagatttcctaaggatcccattcgccctcagtctgacccactaccctccaacccagtcagggtagcaggtatcccaatctctgtctatggtggggcatccaccaactgacagtttcatcataatagtaatgacaagctgatggtatctctctctcacacacacgcacatgcacacacacacacgcgcacacacacagagaatcctatgtcacaaccccagcccctctcccatcccatttaaatcccttcagtccctcccattgcttttagatgaagcccagacttgttaatctggccgacaaggccctgcaggctccaccctgtgggtcaccccactgctcttctctcagtccccaggactggtcatggggtcttagcatattgtctccctccatctggagtgatcatcccttcgggccaccctgttcctcccttatatctcagatcaagcatacttctccccagaaggtcctcacgaactttcctgccagggtcccccagatgggctctcttagcccctccctgtgtttctcacagccacagtttcacatggtctcacatcagctcatgggatgatctgaataggcttacttccccaaccaggatgtaggctctgtgaaggcagggactgcttcattttgttcaagctttctttgtagggcatggcatagtgcctgtatgaaggtctcttattagatttttcttatcacctgggatgagacctggactctaccagagtgtcttccaaaagacttgatccaaattcctttgcatcactggctacagtttttgagcagtctactaacttctttaagccttagtttcttcattagtaaatcagtaataataccaccaaacccacatgcttgtcttgagactatagcaggtgctcaaaaaaacaaaaaaacaaaaaaacctatttcttcacctttgctgttactacttagcctttccaaaatgccactggtctcctcttaaagtccctcttcagcactcctttgcaccagtggcctctaaggtaagatgcttatgggaggatgatggggagtgagaaggcagatacacaagaggggtcattaatgtatggaagaaaatataacacctactattcctattcatcttatctcatccttttacaatttctatttcttggctatgttttacaatgtatgcaatgcttattagacaatgctgtaccatgtcattgaaagtgaaggaaataacttttgtgtcttatttccaagttttggatagtttttttctcaagaggtcggccagggcactcttcatttattaaggaatctggcttgatgtctgagacaatgaaaaatcttaaagcaaatagtctgaagacaggctgaccagttcagcaactgttaccaaattacaggtggcataggtagttgggggttggaatttattcattgtcatagaatagaatgaagttgaacttgtataaactaggtctgaatccctcacccaactaactgagctaattttactgatgataactaaccctttgggcagtcttctctgtacaaaatcttcctgctaaaaaaggatttatatttctttttctctttaattgcaaaattcataaagattccacttgatttactgaaatctatcatatatgaaaaccagttttgtagacattctaacatttttatgtttatatatataatattatgtaaataacatttatataatattatattatataaattagatactttcctgtaaaaaattcacccaatacattaatacagttaagaatgtatataacctataaataaataaacatggtttgggacaggtgcccccccaattttttatcaatggggtctgttaccttaaaagtgtggaaaccattgactgggttcacctaagcgggttgttgaatatttattttctctgagattgtaaatagcactgtctgtagagctttgttgaatatatagtctctggagtgatagtggcatcttgatttttttgttcgtagacggttaacaaagaaatggcaaaaactgtctatagcttgacagctcctttggaggagggagaagaagttttgtatgtacattttcccagcatggaaatacctttttacacacggtccatgtgggccaccataatggtctttaattcagatttcagtagatcagagtggacccacctatccaactgtttccaaccaagaaagcccccgaggtcaggccctggcacttggggtgtctaactcttttgcctcttttacttcttaagttgggaagaatccaccccacttttgcccttgccagctttcccaaggccagggccaaaggggcatggctgaggcatcccccgtgtacacagaggccgccagctggcctgatgcgcgcctgatgccgagggctttgtgacctctgtctccgcagtctgcctctacatcaacaagcaggccaatgcggggccctatctggagaggaagaaggtgcagcagctcccggagcattttgggcccgagcggccatcggcggtgctgcagcaggccgtccaagcctgcatcgactgcgcccaccagcagaagctggtcttctccctggtcaagcagggctatggtggtgagatggtgtcaggtaaggcctggggcaggttgcatgaggaggccatggatgtctctctgcagaggaagcagccatactcaggcctggagacagcaggtgtggccagggtctgtccttcatctgctgggctcctagggtctttatgagcctgtgagctaaaagcctctctcagggctcagggagaggatgattccatgcccgggtaagaagactggatttctgatcctcatcttgactcttctccttctcccacttcccacttccaactcaccggtttttgcttttttttctccacttcaaaatatatccagaatcctttcgctccacttcaaaatatacccggagtccaaccacctttcaccacccacagcaacctccctggttctttaaaaatctaagtcagatcatgcccctcctctgccctaaaccctcctccaatgtctcccatgtcactccaagtaaaagcccaagtccttacaaaatcccacaggccctgtgtgacctggccctggctacctctttaatttcttggttacttctctcttgttccccactctgttctagcagagatgacctcatggatgtcctttaggttctactcaaatgccactctatccaggaatccttttctgacttcttgtctaatatatagcccttgtcaccctccattcttttatttatttatttatttatttatttatttatttattttgagacaggatctcactctgtcgcctaggctagagtgcagtggcacaatcacggctcactgcagcctcgatcttccgggctcaagcgatcttccgacctcagccccacaagtggctgggactgcaggaacttgccgccaagcctggctaattttttacaattttttgtagagatgaatgcctcactatgttacccaggctggtctcaaactcctgagctcatgtgatccacctgcctcccaaatgctgggattacaggcatgagccatcacaccccgcctctctgtacttccttactctgctccattccttcttcatagcacttaccaccatgcagggcagtggggaaacatcatggcttcaaccccatctcagggcatgtcttgttactcaagatccttcagagtcagagaaatccctttttccatggtcacggcactcctccagttttatcccctgatgtgatgtgatagaaagggtacttcacctctgtggtcccaaagaacccataaccctagtctaatcatgagaaaaaaagacaaatccaaacggagggacattttaccctgagcagtactcttcaaagctattagagtgatgaaaaacaaggcaagactgagaaacagtcacagaccaaggagacgaaggagacgtgacaactaaatgtaatgtggtgtcctgggtgggatccccaccagaaacaggacattgtgaacaaacaggtgaaatccaaatatagtctgcttagcaacaaaacaaaaatgaacaaacgaaaaatcctcaccacggccgattgacttgcggttttctccagtgcccggctctaagctgacatctctctggttttccagtctcggcttcctttgatggcaaacagcacctgcggagcctgcctgtggtgaacagcatcggctatgtcctccgcttcctcgccaagctgtgccgaagcctcctgtgcgatgacctcttcagccaccagcccttccccaggggctgcagtgcctctgagaaagtccaggagaaagaggaagggaggatggaatcaggtaggccttgtcctgcttcccccacctgcagggacacctccctgtcccaggtgtctctgcccttccactatggagggagccattgtagctcctggcagttctgccactggagccccatgggctgcctgtctgggtgcctgggaaatatttgtagctggctggaacaaaggggtgcctggacagtccccaccccaggctgcagagggaagtggtccctccagctattaagagctgacattataacttttaggtctatattattagaatttagacaatgagaccacatcacatcatatgtaacaagtaagtttctgcactctcctctcattgaaactctgggcatttgtcattgttgagtagtagcaggactacaaaactaaggaactcatcccaaagaaactagagctatagaactgatgatgttggtcctgcctgggagtctcagacacctacccatgtgaattaaaggtgcaacaaagtgtctattattgcagggatttgacggggccatatattaaatatgtcttccagcaagggttagtgtttcgttctcatcacaagatggaaagtggcctaggggttgagcacctttttgtaccattagccacagagtagctcaggatggaaaagtggcccttggggagggtagcaaggccacacaggcatacatgacacagtgttgtctacccaaggggctagatgtcaacaggaggtgctccttctccgctaagcagccctgagttatagatctgcaaagaggtgaaggtgaatctcaaggatgggtagaaatgttgctttttttctttctctgaacacagggttgttggtatatgaaaagcacacaggcagtacaactggaatccagttattacgttagtctgcaaacatttggtgaaccctcttctgttccaagcactgtgtgagaccctgccttggataagtcaaatgcatgagcttaggaaagtagagtaactgctacaaataataaaaaacagatacatctgcaggtatgtgctcgcagacaggtttagcgcattcaacaaaaggatacttatcataagagaggctgtgtctccaattcaagaggacagcagggaaggataaatttagattctctgcatagcttttcttggatactatcaaaatctttcctacaattttgcttttatctctctgagtcctgggaaacaggaagaaatttggcctctgcaaaggaaggtacctaattaaatatggttggtgtgagcagatgctatttacttttatgtttttcttgatgtctctgcatgtgtgagcttggagaagtctcatctctctccgggcctagatttcctatgggtaaatgacaggttggagttgctgatacagcacgttcttctggttccaacagtctatgaatctggcctcacctgtaaaccctagttgactcacaaacatattcttaaactatttatcttctagtgagtgttgcaatgagaatagcagaatcatgtgatttcacttctcagatgcttgcctcattgttacattgaacacacaatgacccatgggacatcatcataaagcagcataacccgtatctcccattgtcctctaattgtatcctgcgggactagttcttccctgactacggatgaaattcagaacaagtattggcttttctggctcctttcaggttacaaaatgttctctagtcaataattgatatgtccaggtcagggtgataattgaactttattcttagtgaatctattataggtttttacatgtggttgccatgaggcttataaaaaatgctacaggtataaaaagttactttaaagaaattacaacttatttcagatcacacagacaagaatagaaacaaggaaaaaatgaaaaaacaatcctgcagtttaactccatcccccctacagtggacttttagttgcctctatttatatgttttgatattacctatctcttaagagattgttctagctattattgcttttaatagctttgtcttttgggcttcatactagtgttataagtggattatacacagcaattacagtattagagtgttgtgggtttgtccgtgtacgtaatggtaccaacaggctttgtacccgcagtgttttttttttctttcacattgaaaaactgcctttagcatttcttgtaagatgcctgtgatggtggtgaattctctctgcttttgtttgtctgggagaaaatttatttacccttcatatttgaaggataactgcttgatacagtagtcttggataacagttattttttttctttcagtacattgaaaatgctgttccattccctcctggcctatatggtttccactgagaagtctgttgccagatgaattggggttccttcaaatgtcatttgcttcttttttgttgctgcttttaggattctctctttgtccttggactttgagagtttgatgattataatatatgccttggggtagttttgtttgttaaaatctgtttggtgttctctgcccttcctatacatgcatatttgacccttctcatcttttggaaagttttctgttattatttatttgaatgagctccctaccccttgttcttgcttgactccttcttgaacactaataattcttagattttgtcttttgaggtaattttctatatcctgtaagtgatcttcattaattctcatcctttttccttttttctcttttgactatatttccaaatagtctatcttcgagctcactaattatttcctttgcttgatctacttcactattgagagtctctaataattgttttagttcagcaaatgtatttcttagtttgaatatttctgtttgattttttttaattatttcaatctctttgttaaatttctctgatatatttctgaattgcttttctgtgttatcttggaaatcagtgagtttccttaaaactactattttgaattcttggtcagagagctcacgtgttaccatcttattagggtcggtttctggtcccttgccttgcccatttagggagatcacggtttcctgtcagccgttgtttcttgtggatgtgtctatgtctttgcattgaaagaatatttatttcagtcttctctgacttgtttggcttttattggatatatttgcttataggttctttactgctaggtcactgtctttggttttttggctctacatggcaccttaagcccaggtttgccttagctctagtgaatgattgaagcattgccctttccaaatgcagaaggtcccaaaaaggtatatcccagcagtgtgggaaggctggctaggggcttgtgcccaggggatctgtgggacaaacctacagtgtggtactgcgtaacagccacactgatttgaaatctcccttgggcaagtaactaagcagagttcccagggctggggatggtagttctacctccctgctttgtctctggctgtcctcagggatatttctcccttcgggcactctcaatgcttcctatggattaaggcaaggacaggcctcctgccatggaaaccaagatggtgtgaaagctggttgtacaccttgatctcactttttctagtgtagaaacagtgaattgggagacatttttctgcatgcttggtgctaagcagatggagggagggacttgaacgtggaagtcagattctcttaccctctgctcagagttttttcatttctctgtggccccaggcactgtctcctcttcatatttgagttctgggatatttctggttataatctcggtgctgtacatttgtttttgattttctgtggtggggactgaagccagcttgcttctatgccaccagtttggaacttgaagtcggcctcgaaactttcagtttcactcaaagacataatgactgccccacacccagctcaggcttgcttcaggccagttgcctgcagcaataaagaagggcatggttggcttctcccccaaccttcccccttttgttattgcctcctcccatagctcgctaaccttgatccccttcacagtggatgggggaaggaggagacgcaagaggcaggggaatttgtacgtgatgaatcttgctgtgagttggcatcatgctctctgcttctagccgatgtttaaagctgattcttcatcctgtgggcttttacatgtgttctttggtgaccctaccatctctcacctgcacttgcatgggcatggacaaatgcaactcttctctagctggtcatttacaattctttccacagtccaaggcctctgggggtaaatctctagattcagctgaagccctctcgcacctccagactgccctgtggaaaggatctaagatgatcctgctgcagatctatgtcttctgatggcccacatctggtccttgagaaacactcgcacatcctctgaccaaacaaactctggatgtattggctgatccctgcaggcacctctcctttgttctgccagccaagggccatcttttagagcttgtctctcaagctccagaggacagatctcaagctattcatgtgttcacactgaagccatgcactggatcattttctccaaaatttctcttctagttaaactgtttctccgcctctacaacctcgtttgcaggatggatgtgggtggtcatctgttggtgtaaaactggctttccaccatctctttttacaagacccgcatggtggtctcacactttattgtggtatatggtgtctgttgtcttgcagctcagctaaaactgagcctaaaatggtttccttttaacatcttattccaggaggatgacagccttccttcctaaaagctgatgtccccatctgaaagctggttttcctcccagtcagctgggaggtttggaagtaatgaccccagttgttctcttgagccctttcctagctcataactactttgaaaaaataaattgctctaaattatccaaccttgtggcactgatttctcagcagagctgagtgctgtgaattttgcttgtcagggagccttggggaaagtggaggaagcagcgatggcatggtaagctctgagcagtaccctcaccccacatgtctttcccaccagtctgtcatgagccctacaatgacgccattagggagtttgcctttagagtaagacattgtctctttaagatcgccttgtcaaagtttctttaaataacatgtcaagttaccagtatgttagaggatgaattagtttatcatccattttctcaccattgtgacaagaaaggcatatgcatttgtatgagggaagggtggaggtttttttttgtttgaggctccatacatccataggaccacattgttcccgaacaggattgtaaggtcatgggcttatctgcatcaggacaatgcctggttctgcttggccccagggttgttctgttcaagttgaagagttccaggattggtgccatgcacctaaagggcttgtcaacactcactggaacatttccagaagacagttaatcacatgataagaagatgcaaagccatgacagctaaggaactatggaaagaactgggatgtttttggtagaaaaaaagagaagatttgggaaagatgtgattttatgttccagtatatgacagcaggtcaggtggctttgttctctgtggtcctgtagaacagaactgagactaaataagtaaaaggtagattgaattaaatctaaggtcttgtccctcaaactctggtcaggggcattgttatcacccaccaaagccaaaaatctcagtggccctgccaaactttcaaacaacagatccccaggtgctttgaagacacattagagaagcatagatttaaggaacactctcccaggtagagaacttagcagttaaataaccagatggaactctcagaagatagttcccttgggagtcaggtggagttgacattgtaaagagctttgaaatgtcaaagccactcagaatttgaaggggctgcttggaaggtaggtgataatgatctccccattgttggtgacaaatatgtgtgacttgttagggtcattagtgggaatgttggccacctggaggagtaggagcaagatgttctcgctggtcccttacaggctgacagctccgggctggaggtggcagagaacagccctgtacagcgggagggcaggttaccttcaaagcattagcaagggcctcccagaggtgaaggtatgggcaccaagacaaagtggctgtattagaagcaagacctcttcccttgaagaagagggagggcttcttccacatctcttcctcagacttttgaaatataaactctcgatcctttttttttcaagatggactctctctctgttgcccaggctggagtgcagtggtacgaactcggctcactgcgacctccacctcctggattcgagcaattctccagcctcagcctcccaagtagctgggattacaggtgtgcaccaccacacctggctaatttttgtatttttatagagacgggattttgacatgttgcccaggctggtcttgaactcctgacctcaggtgatctgcccgcttcggcctcccaaagttataaactccctattcaaatgatatttttcctgtgcttagggaaaatcagccttcaggcttccctgctgcctgaattcagcctggaagttagagttcttggcctgagaccaggaacttagttatttccctccaattctattagctgacatctgaaggtggtttgtgtttggggaagtaacacagctccctgggtgttttaggagaatggaggcagaaagatggatttgataacactggtggctctgtcagaagtcatgagatgaccacggggaaaattgttgttgcctttgagtgttaaaatttaaaaagacccaagtataaatatgctttagccagtgcttctcaaactttaatgtgcagaaaccacctgagtatgttgctaaaattcagattttggttcagtaaagctggggtggggcctgaaagcctgcatttctttttttaaaaaaaattaattaagctaaattcaattttttatttgtacaagtttttggggtacaaatgtaattttgttacatgcatagattgcacagcgctgaaggtagggcttttaggacacccatcacccaaataatgtacattgtacccattatgtaattctcctcttccctcccacccggctcaccattacaagcctgcattgtctatcattccacaagacagtctgccttttaacaggtgcccaagtaatactggtgctgctgatattggtgcagctgatagggcgggggccacaccctgagtgatagagtgtgggtgggctggcagagtcctgctcacacagagaaacttattccaagttttcagtacaggaagtctgtctgtgctaagatggttcttctctgctataagtgtggcccctgaagatgatccagtgttgagtggaggtgttttgtgggctggaagggaagagaagggcatgaagggcagagtggttggatcgaggtggcacttgtataaatccaggggagaaagacaaggcttgcatatctggggaagagggtgaaagataggaaagaatgatgacaaacaaacaaatttctccccatggccagcaagcacctgaagcatggtctctggtgccctgtaaaccttccccaatccgaagaaggtatccctctgttctccccagatccttatttccacgtccacaatggcatttgattctgctttatattgcaggactctgcatccagatctcttcttcctgctagatagacctgggggtccccagcagagcctgaaacacagcaaacacgcagtaaatacctactgacttgaattctatgcaacacgacagaacaaattgtctgctcaccaagagtaggagatctttggaaaccacaaatgtgagagttgaactattctgcaagatctaatttagttgctggtttcctgccttttgaaggtttagcataatggggacagattgtttacttttgctgagtagcttctttgatatacagatggcagggggtggaagatgagaacggacatttattcttgaggcttactgtttccttccttggctggtggtctttgagcaggcaccagaacaccctcccagtaatagtcactcacagtgttccattacggttgaacctatacactcagcattgagaaatgaaacctgcttcctatccaacaacacatttatctagtagaataacattacagagaatatatggagaatgtctatctttacaaaagatcatttatttttaaaagggaacagagttcatcaagaggcatgagtttcattacatggacccatccatttagtcagttggcagatagtgctgagctcccctgttggtaatgcagcgaggcgcacagggcccaggtcacttgtttagagccacacacacagcaagatagcagcagggaggaaaccgagagcaggtcttctcatccccggccctttgcttttcctctccaagtttttccttattccaagtttttctgctgtctgtaaggcccgttatccagcactggctgcgtggggtgtgcatccctgtttctcagctcagagggctgactgcacacaatagatgtccacaaggggcttgtggtacacctgtgttgcttctagcaaagatgtgaaagaacagaacaaaccccagccctcatttagcaaaatcaaggaggaaactacactctaggaagatcaattctcttctcctcctgggtttcctgcctttcccacacgggatgttttccccgtgtccttgtgttctggctacatcggggctggatgacaaccacggggcaggcacagcccatcattccagctgcccgggaacttcctcatttctacaaaacccacacaagtagcctactccaccagacagtggcagagtttgatctagtgtttgaattaatatgtggaatgatgggtagaaaaagaaaagaaataaagggggagttcttgattaatgggtatagagtttcagttttacaagacgagttatggagatagatgctgatgatggttatgcaacattttgaatgtatttaatatcactgagctgtatgcttagaaatggtaaagatgataattttttttttttttttgagacaaggtcttgctccatcatctaggctggagtgcagtggcgtgatctcggctcacagcaacctccacctccagggttcaagtgattctcctgccttagcctcccaagtagctgggattacaggagcctgccaccatgcctggctaatttttgtatttttaatagagatggagttttgccatgttggtcagggtggtctcgaactcctcagctcaagtaattcacctgcctcagcctcccaaagtgctgggattacaggagtgagccactgtgtcgggccatgactttatgtgatatgtgttttaccacaataaaaaaaacttgaagaaaaaaaaacagaactggaatccccccgccctcaaaaacagaaagaaaggaaaggaatgaagagaggtgcgttcctgcagatgcctttgcacctgcttgtgtcccagtgcaggccacatgactggaacattgtggagctgtgtttgtcacagccaagggccacatggacaaatgagctgtctcattctcaagctgagcattggaaaggaggtcatttggaaggagaataaactattgacaagctctggtcttaagaatccttgcagaaggttttgatgaaaaggttgaaaaagaggctgagctcggtggctcacgcctgtaatcccagcactttgggaggccgaggtgggtggactgcttgaggccaggagtttgaaaccagcctggccaacatggtgaaaccgtgtctctactaaaaatgcaaaacttagccaggtgtggtggtggatgcctgtaatcacagttactcgggaggctgagggaggagaatttcttgaacccaggaggtggaggttgctgtgagctgagattgtgccactgcattccagcctaggtgacagagcatgattccttctcaaaaaccacaacaataacaacaacaacaacaaaaagaaactaaaaagtgtccatcagttttgtagaaaatacaaaagccttcatatttttcctgacacttagggccatagaggccaacctagaacccttacaccatggaatagggagtgttctccagggtaggagtcctcatcctaactctccccatgtgcctacgtaaattcatttaggaaaagctttatattttcagtgatatctttcattaaattatgatatctgtacatattttaaaatattgaactaaaagggaaaaatgtaatctcttttttaaagaaggtgcctccagagaaaagcctgcatttcgtagaatttaaaatggattctctattatgtccagcagttgattggatccctttgcattgtaaggctcaggttctctctcatgtcctgtagataccgaggaagttatttactccataactattaaccaatgaatgaatgttccaattaagttgttttaatcgcccaaggtatcttcaatatgaactagagtaatattgagtcacgttgacccctttgataaaatttcggtagaaagtaactgtattcaaacaaacaaacaaaagaagtgaacactcttcttgtctaaatcacaatttattttgtggattaaagatgccagcacctgagacttgaggagtagaatgatgctggtggtaaaccccttgcaggctttctactgtttgggggtgtggaggagataaaaagcctgaaaaaaagaggccaaatggactccttcttcctagaaggctgaccccaggaatcctctgaaagacacccctacctctaccctatgcccactcctcaaataacaaaatctactggaaatctcctgtgttccatgaggcgaacagtccctcatgtggcgcccccactcctcgattctccgtgagccattagagctggccagatggccgggggtctcccagcctctctatcaaatagttgtgtctgtgtccactgcagaagatgttctgtttctggtgagcctgtccaaagaggctcctgcctctgacagaagagtaggtccgggagatgggccaggcatctaagtagatccaaggggttggaaaccaagttctctgattatacctcagaacagtggaagcacaaggactggtggaaacaaagggacagggtatgtgagatgcagccattcgaggcctccaggacctgcacaggttgtattagagaccccttctggttattcccctggaccacaaccctgagcccctgtggcggaccctaaggtactgctatctgcaggctactcacaccattatctgttgtccatgcttgagaactagggttagaatggcaaaccatgccaagaggagctgaagcagcttaggaaaccagtaggcttctaagatgaacttcatgaactctctcctaatagtggtgctttctgtgtttcattcataagcaacaaaccctttgctgaaaaaaactacaacaaacaaacataaactccctggcagagaagtgggcagatactctgtaccagatctatcctagctactgctgagttaataatgacaacttccaatctggacatgcagaatcaagaggaatgaaacggcttcctttcttctgtccacaatagttatcttttgctgtgtcataaattacccccaacacttaggggcttaaaataacatttagggtctcacagcttctgtgggtcaggggaccaggtgcagccacaggccttctggttctgaatctctcacaaggctgcatctcaaacctcaactagggcaggacccacttttccagctttttcacatggttgtcagcaggactgagtttccaatgagctgttggtttgttgccagatgggtccctttgcagagcatctcacagcacagcaacttgctccaccagagtgagcaatgctaggagtgctgtgaacctctctcaaagtcgagatgtccatttagaaaggaaacttacaaggcgtcctctattccaggaacttcagcattttcctgattaaggaccacttttaatttccccaaggttctatgaaagaccaaaaaattgtgggggctgtggaggaaacagcgtgaccacaggatgtcccacccacttcgcctcccccagctctcgggaattctcataagcttggcgtggaggtttggcaaagctgcgagatcatatggagggtggtatggaacctgctctcctcccgagagcacagaaaggccattcattatcccaaacagatgactttggtcaaaaatgcctttggtcaaaatttccaaaggaggaaatcaacccctaggcttagaacaaagtcttaggcaaaccagaaacatctgagaggatgtaagaagttcaggtgtcaggcattaaaattatggtcggttgctgtgcatctcattaggggagaaaaaatagaaatgtacttaaatggaccagaggggagtcataaggttgattctcagggctgagtgatctgaactgcagagacaaccttagagagaaaatccatactggccagagaccaagttaatggaaaatttaattgaagcaaatgaaatgctcagcctcataggtagtatggccctgtgccctttgaaccagaaaggctgggccaggaggccacagagggccctaagggaaaactcccttatctgcaagaacaaggggcgggactgagtttgagaaaagaaaatctgcaaacctccacaggagcctcagtgaaaggctgcatgcaggggaggaaaccttcaggttttggtcaccaggaagtccgttagagattcacagcagaaggcccctctgcatcccacagcaccaagcacgtgctggaaaccggcggtcccccagaggacagtgggagaggctgccgggtggcagagacacaaccaccaaggtaggcaccgaagcacctgtgtctgggctctgagtaaaagaggtgcagctggcacgagcacctgctactgcttcctgcgccttctccctcctgcccctctcctcgcaggtctccttttcctgtactatctaggtgatggcacctggctaagcaaagaggggtagctgctccacagctctacaaatctgcgaactgcactcctgccttttctaatctgggtttcagggctaggaatctctgatgttgccatctctgtcagcaagccgaaccaaactgttcacacacggaggccacaggacactgaccattgcctgggcagggtgtgggggtcggcagggctgggcagaccggcaaaggggtcaggcaatcaatcctgagcaaggccagggctcccagtctggaggaaggtggtcgtgctgattgtggaaagggctcactctgcagctgctccctcaactgggaagactgatgcgggaagtggggggtgagagagagagagaaagacaaacaggcagaactgtttagagatgacaaatagtgtctaagactagatgttgtggttcttattgccttaataggtattatgtgagaataattttgcatagtggaattgttgtgtttcaggacttcatttggttagtgaatccaggtaaaatgccagtttagtttttaaaaataaaatcaatagtccgagcccactgggctgtaagcagttaagccttgtgtcctaagtgaggagagctgacacttggtcaggagcatctatagttttatacataaggtccgttttcccctccctgccgctctgttttgggactttctctttctctctctggctcgtggctttctcctgcacctcttcctctttctgcttctctctttggaggttctctacatttcaggggctcacacctgaccctccaggactgtagcagaaatgggctgcacctgggtgtcctggaagccatggatgcaggggcattacctaaccctatctccaccccaggcttcagcaaggatcagggagcaagggaggaatccacacactctggactcagaaccctgaagctttgatccctaaaccggaaggcttaggcacagttcaggttcatatgcaaacaggtatgccttgaggcttgagtgggtttacatgcttctagagtgttctttggcctcactaataggcaggctttatacacagtggctggagggaaccatagtccacaagcaggtttagcgatggtgaaaaaggaccatcagtctgtcctgaaagctcccaggacgccaaaccttgaaaatgtggcagatttctttgatggggccacgtgtgtgttttcctttctatttaagcatgctctcgtgactgtgcaaaaggcagatcattctttttttctggaggaaaagatttaatgattcttaaatggcaacattagtctcttggctggatgcagagggttacagaagtgagtaaaaagccactcatttaccttgctttgttaagctggcattctccactgcaattaaatggcctcacacaggctgggttggagcctcttgttgatgagcagtgccagggtgacaagacagcttctttcagatggaaaaggattttgtatggacacaggaggaaatttcgaccatgagtgccttcgcctgtgagccctacggtctgccgggactctgtgtgcaggagttagatcctccaacaggtcggctggccccatctggtgtttgctcaccagtcagccacaaaagcgcttgaaaagtgggggttccctctccagatacagacttggtcctttctttttactgactttaaatattggatttaggtaagaaacatatgtcacagttcaattaaattcttaagctcctagtagttctgcatacctagaattcatctgcctcatgttggatgttgaggtgacctaacatgttggatagtgtaaagggtacatgtccagcagtcatgtgttttaactgaagcaagaagaattgaggctagatgtaaggaggaacttttaggcaatgagattcatagcacaatggcctcactctaaaggagattgtaaaatctctttggggaagctttcaaataaaagactcagttatctaccatagtttcttttctagacaacaccctgcctgaagagataggttggggctagctcaatgcattccaaatattaatttaccaccttcacaatttctactgtgtctgagtaacacttatagaactgtctactcaagatattcctttacattaactcatgtcttttaatcttagccattagtcagcttaagcaatcatactgtatcagtgaaatcattttgtttgatgtgctaattatatgtcgtggatgtacattgaaatacatgacaataaaaaaacatttactggttgtcgtaggctgaatcgtgtatgttcaaattctcgggtatctggaaccctttttggaaatgggatcttatttggaaataggatctttgcagatgtaatcaagtgaaagggaagtcatactgaattagggctctaatcccatgactggtgtccttagaagaagaaggaaatttggacacagatcgtgacacacagagaaaacaccacagtggaggcagagattggagcgctgtctccagccaaggaactccaaagattgttggccaccaggggatgctagaaagaggccaggagggattctcccctagagtcctgagagggagcctggccctgtggacaccttgatttcagactggtaggctccagaactatggcagaataaatttctgtcgttttaaaccacccggtttgttagtttctgcaatcctaggaaatgaatatacccatgtggttccctgtcccgccagtggaaagcatttaacatttggggaaatgctgggctgggtgcttgtgaaggtccttttccttcctgccaccgaatgatgagggccatcaatgcatctgtcacttttacgcttagctatgatgtatcagaacccctctatagaaaagtgcggaaaatgcagtttcaatcgggtttgaacagatccatttcatcaattctggaagccaccacagtgtgtgcatctgaacgtgctgttcactcgcggccacccaggagccactttacagagccacatctggggcttggttgatttgtcttgacagttgtccacctgggcagactttggaaccaccagcacatcctttgcctgggtagaaggtattgcttgatgccctccgaagcctattttcccttctgataattcatttggatcacagcccagaggttagcttttattacctttgatctcacccacgggcatcagtagtttctttctttataattatttatttatttttgagacagagttttgctcttgttgcccaggctgaagtgcagtgatgcaacctcagctcactgcaacctccacctcctgggttcaagcaattctcctgcctcagcctcctgagtagctgggattacaggcgactgcctccacgcttggctaattttgtatttttagtagagacgggtttcaccatgttggccaggctggtcttgaactcccaacctcaggtgatccgcccaccttcgcctcccaaagtgctgggattacaggcatgagccacggtgcctggccgctgtcaacagttttgaaatccattcagtgcatgttcccttgttccccattcccacactttgcgataagggaatgatctgccatctgcgtctgtattttccaactatagtgccagtcagtgaattatctgcattctctaccttagactatcagaactatgtaggcatatttaatttagacttaaagtgttcaataagcagtgtactgtttttgttaaatcttttttcattgtttatcacaaatctacctaaagaatttatatataagctctttataatatcaattttaatgagtcttctgtgtaacggcagccttacagctaacattggctcaaatgtttactcaataaatatttatcaagcacttcctctattccaggcatcatgccagatactgcatgtagcttcctcacatataccaaagcacctgacatgtgggacacaaaaaggattggtatcccagactatgagaactttccaacaaaaggaatataatggcagccttactgcttactggctttagatcgtagatagtagatagtagatgttcaatacacgtgagttttcctttccctcactccattcagaaagcagcctagtatatagctccatagccaggtcctttttagaatctcccttccgaaggcttctgacccagagggaagagatgcagcgaggccatcaaggcaaagatgtagcgttccagggtcctgaagacatctcgcagcacttcattggctgcatagcattcggcacagagcatgcagaccctttggctgcttaggttatgtgtgtcctggtggccaacgccgtgtttgttacacttgactgcacgtaattcttgagaatatgttcatagcctcatctgaaaagcactgaacttctgcaaacgccttttaaaaaaaaactttattgagatataattcatatatcatacaattcaccatttaaggtaccattcagtgacttttagtacatagatatgcgcagctatcagcacagtcaattgtagaatactttcatcacctcaaagaaacctcccacataccctttagctattacccaccccacaccccaaccccaatccctaagcaaccacgaatctactttttgtctgtatagatttgcctttcctggacattttatataaaaagaatcatttgacatgtggtctcttgtggctggattcttttactttgcataatgtttcaaggatcattcacactgtaacagatatcagtacttcattcctttttatggacaaataatattttgttgtatggatataacagattcttaaattttattcattcgttgatagccacttgagtttcttccactttttagctattatgaatagggctgctgtaaacattcatgtacagatttttatgtagacatttgttttcatttctttttagtacatacctaggagtataattgctggttcttatggtaattctactttaagcatttgaggaagtaccaggctgtttcccaaagtggctgcaccattttctattcctaccagcagggtatgggggttctaatttctctatggtatcaccaacacttgttatctgactctttgattatcaccttcctagtgggtgtgaagtggtgactcattgtggttttgatttgattcgactcatgatgtggatcagctttgatgtgcctactggccatttgtatatctttttaaagaaatgtttattcaagtcctttatccattttaaaatcgggttgtctttttattgagctagaataattctttttttttttttttttttttgagatggagtctcggtctgttgcccgggctggagtgcagtggcacgatctcagctcactgcaagctccacctcccgggttcacgccattctcctgcctcagcctcccgagtagctgggactacaggcacctgccaccatgcccggctaattttttgtatttttagtagagatggggtttcaccgtgttagccaggatggtcttgatctcctgacctcatgatccacccgcctcagcctcccaaggtgctgggattacaggcgtgagccaccgcgcccagccgagctagaataactcttaatacagtctagtcccttacacaggttggttgtataagtctagccccttttacaagatatacaagtccctgatcaaatatataatttgcaggtattttcccccaatttgtgagttgtcctttcactttcttgatggtgtctttttttttttttttttgagactgggtcttgctccgttgctcaggctggagtgcagtggcgccatctcggctcactgcaacctctgcctcccaggttcaagcaattctcatgcctcagcctcccaagcagctgggattacagactcgcatcaccatgcccagtttatttttgtatttttagtagagacggggtttcactgtgttggccaagctggtctcgaactcctcatgtgatccacccacctctgcctcccagagtgctgggattacaggcatgagccaccgtgcccagtgcaaacgtgcaaaagtttttaattttgatgaagtctaatttattttattattttattgcttgtgcttttggtgtcaaatctaagaatattttgccaaatccaaggtcacaaacatttaccccatatgtttctttctaagagttttataatttttgctcttacatttacattttttattcattttgagttaatttttgtatatggtgtgagtaagggctttcctttagtcttttacatgtggatatccagttgtcccagcaccatttgttgaaaagactatcctttcttccattgaatggtcttggcacccttgtggaaatcagctgaacatatacacatggatttacttctggattctgaattatatttcattgatctgtatacctattcaaatgccagaaccacactgtctttttttccctctccaatgacattggctttatttatttatttttttaaaaaatttttaaatcaacgcataagagatgtatgtagttttagggtacatgtgataatttgttacattcatataatttgtaaagatcaaatcagtgtacttgggatatccatcgccttaaatatttgtctttattgtagaaccatttgaattattcttttctagctattttcaaatgtttaatagattgttgtaaactatagtcactcaagtgatttctcaaactctaagtcttatttcttctataaaaccatatatttgtaactttaatcaacttctcctcatcctcactgacctctgcccttcctggcctctggtaaccaccaatctactccctatcttcatgagatccacttttttagctcccacatatgggtgagaacatgtgatatttgtctttctgtgcctggcttatttcatttaacatgatgacctcccacattgtcttgattattgttgctttgtactaaatttggaatcaggaagtgtgagccttctactttgtttttggttttcatgatggctttggctattctgtgtcccttgcaattccatatgagttctggaattagctcgttattttctacaaataaatcagtgaagattctgacagggattgtgctgaatctgtagatcaatttgaggggaattgccaccctaaaaataagccttctgatctatgaacatgagatttttttttccatttatttatatcttctttaatttctttcaacaatgttttgtagttttcagagtatgtttgaacttttgttaaagttattcctattttatttattctttttcatactattataaatggaattattctcaattttattttctaattgttaattgcaaatgtgtagaaatacaattgatttttgcacattgatcttgtatcctacaaccttgctgaactacttactagttccaacagtcttttaagtagattccttaggatttcgtacacataagagatagttgtacttcttccttcctaatccagatggcttttcttttccttaacctaattgcactggctggaacctctagtacaatgttaatagaagtagctggaatggaccgtctctttttgttcctgatcttgggggacagcatccagtctttgaccattagccatgatattacctattggttctttgcagataccctttgtcagattgaggaaattcccttctgtccctagtttgttgagtgattttatcataaaagggtattggattttgtcaaatgtttttctgcatctgttgaggtgattgtgtgatctctgttttattattctatccatatggtgtattacattaattgattttggaatgttaaatcaggcttgcattcctgggataaatcctacttggtcatggtgtatatatctttttatatgttgccgggttcagttttgccaggttttttgttgaggatttctgcattcatatgaataccagatattggtctatagttttcttatgatgtgtctgtctggttttggtatgagggtaatcctggcttcgtagaagtatttgccatagaagctgggaagtattccacccccttctattctttggaagaatttgtaaagaattagtattattttttctttaaatgtttggtagaattcaaccgtgaagttattcaggcttgggctttctttgtgggtagttttctgattactaattcaatctttttacttcttacaggtctactcagattgtctttttcttcttaagtcagttttagtagtttgttcattttatctaagttatctaatttactggcatacaactgtttatagaacagatggttccctacttaagatggtttgacaatgatttttttcactttatggtggtgtgaaagtgatacacattcactgaaaaccatgcttcaagtatctatacaacaattctgtttttcactttcagtaagtattcagtaaattacatgagatattcaatactttatcataaaattggctttgtgttagatgattttgtccaactgtaggctaatgtaagtgttctgagcatgtttgaggtcagctaggctaaactataatgtgtggtagagtatgtatgctaaatgcattttcaacttatgatatttttaacttatgataaatttattgggatataaccctattgtaagcaaaaagcatctgtatttctcaatctttttcaatttctgtaaggttggtagtaatttcctctctttcaggttttcatttctgattctagtaatttgaatcatctctctttccttctttacgttttatttgtttatttttttgtcaatgtagctaaaggcttgcaattttgttggttctttttccaaagaacaagcttttggttttattgatttcttctattgttttttaaaattctctattgaattaatttttgctcaaatctttattatttccttctttgcttttttttccagtgtcttatgatagaagattaggttattcatttgagatctttcttcctttaacagaagtatttacagctgtaaatttacctctagccactacttatctgtatcacatcttcaaagacttttatttttagtcaagctccacatccatccccaactatgagaagatctgctagcttccctaataaaatcaagtcttaatcttcaataatcttcctacattgtggaagaatccatgtatggagaagacatttggatcttgtggcctcaaatttgtttttcattgccaatcatggaggatccattggtttttgttgttgttgttgttttgttttgtttttatttttcatatttttgctgattgcattttctttgggcataccaagatctgttttgatggtgtctaatatacagataattattgctggggacaggtagacatgatcttgtcctggtgggagggactagaatagtttccttctttctatcaccgtaatttctctggacttcccccaccccccaaaagaaaaactccacataaaaataataaaacaaacaaaaaacccaccattcggccacaggtgtagctcacagggagttcaacaggctcaatgttgagctttaaaagtataggactgtaatcccagcactttgggaggccgaggcagatggatcacttgaggtcaggagtttgagaccagcctggccaacatggtgaaaccccatctctactaaaaatacaaaaattagccgggtatggtgcttccagctactcgggagtctgaggcaagagaatcgcttcaaccagagaggtggaggttgcagtgagccgagatcgcaccactgcactccagcctgggtgacagacttattgattaaaactccatctcaaaaaaaaaaaaaaaaaaagtatgataagtcctggtttacttaagaggcgctgatgatgaggttggcagactttctaagtcctctcctccctctgcactttagcttggctctttagctctcctgtgaagggtttggggaggattgtggggctatccagatcagcacttgcatccctgcttgttagccgtggcggaggatggctgccctcatgtgtttgtatcaggactaaaggtgtggggagaaagcactgtggcacctgggccaccacccaggccacagttgtctctcctgactctgggacattgtgactcttgcttgatctctcccaggagtcctgagccaggtgaggggggctgtgctggtgggtgagcaagagcagggagtacagggagattctgagaagccagcagagactgtgagggcagagccactgcagaagaaagtctttgatcttactcttttttttttctttttttgagatggagttttgctctgcaacctctgcctcccgggttcaagcgattctcctgcctcagcctcctgagtagctgggattacaggtgcctgccaccacatccggctaattttttgtatttttagtagagatggagtttcatcatgttggccaggctggtcttgaactccagacctcaggtgatccacctgccttggcctcccaaagttcagggattacagacgggagccactgcacctggcctgatttgggcttattaagtcatcaatggccaaaatatcaattttcctctaagcaccgaggagcacacctcctaattcctattacaatatgctcctgtgggcaaagcagctctcagcctgctgacaggtatgctatttggaattatgttgtggggttcatttctcctctctgcatgctcacaaatactggctactgtgttggcagggcagggtttgccaagacggagggtctgatagcttcctgaactgctctctgatatctgcttctctgtattgccttattgcttagtcaagacagtcaccaccgaagagtacctggtgaaccctgtgggcatgaaccgctacagcgtggacacctccgcctccacctttaaccacaggggctccttgcacccctcctcctcgctgtactgcaagaggcagaactctggagacagccaccttgggggtggtcctgctgccaccgctggtggtccccgcactagccccatgtcttctggtggcccctcggcacctgggctgaggcctccagcctccagccccaagagaaacacgacctctcttgaaggaaacagatgtggtaatgtaatgcatgcatcagcttcccactgacttaacatcccttgcccttgcgcggggagcacagcatctggggaagggggagtgtggctgtttaaacgtgggaatgctgggagatcagaaatttccacaagtcctttcatggatcttgaggttctcaaaaacagccaaactcaacctttgataagcaaagaaaatcgtgtattagggcaggctaggccacaggatacatagactccaaaatgtacacaggctcaaataccatagaaatttttgttcgagagccaaaggtgaatgttcctgattcatggatgcatctcaatatagggacataggctccatctattttgtggctctgccaccctctacagccttcatgccccatgcattagggaatagaaagggaaagaaggtgtggagaagacacaggtgcttccctgcaatctgaaagtgatgctcatcacttccactcacatctcattggcaaaagctggtcattttgccacacttaaccataagggactctggaagctgtaggttagctctgcccaggagaaaggagaaccagaccttggtaaagaattgtctcttgcataggaagtgtcaccttcaggatacaaatacatgagcagaggcagagttaggcaaaattcccccaatgctggttgtaatgccacttctgtctcatccactaaagaaagcttgttggaatgcagtctacaaaagcgctataagggctaaaggattatagtaatagcttgaaggcccttctgattgatgttttaaaaaatcattttcaagcttcagtattttgatagtgcctaaaggccatagagtatagtggataatcactgggactagagccagacagcctgggctgagatgctggatctgctgcttcctgcctaccttttgcaagtcttaacttacctgtgcttcagtttcctcacctataaaattgtgataataataatggcagcacctgcctcataggattgttgggaggattaaatgagttcatacatgcatttagtacaagacctaggaggtaacaagagctcaataaatgttagtagttacagcatagatctttttaacacatcccttaacagatcacagcccatcagctccacagctgagaactgctgaagaaagaaggccccaggccaaggagtctgggagtcttcatcttgccaccctgtagcccctcagtgggcaggctctgtcttctgtggcaagtcacatttctcccctgagcctaggttccttccaccagtgaccccagcaagccgcacacgtgagctattttgtatgattcaagaccctccacacattctcttccaagagcctcatccaacccagatgagcgtggccctgaccagcttcccctggccaaggatggagaggtgagaaggggccccttgccggagaggcgttctgaggggtagagcgcagattctctctccacagcagctcttaccaaatgtagagatgccctgcaggccactttccaacactgtcacacagggccatgagccaggcagattaagtgagcagagccctattttccaaaggagagcaacattgttccatttgattcctaagaacaagagaaagggacaagatctttcacgaaccaacactgtaaagtaaaccaggggcagccttgatttcataggtttgtccccagtgttagcttaatatctggcatgtggtaggtgttcaataaacatgcatcatgtctgtgccctcatggtgtccctttgtcttcttgtcaaaacactcatccttatgtccctcttgagtttaaatgtctttctctcatcctcttctcctcagccccattccccttttctcagggtggtgatcacaggacaccatgctgattgaattgactcataatcccagagtcccactttttaaaaaggagatatttactctctctcccactcacgttggtgcaatctcagccctatgtcttaaatgcaggatttccagcagtaagagggaggcatgatttggttggagagaacttctatcactcactcaacaacagtctgccctgttcagtccaactggtgacccagggccagggaatccagggctcttcagagggcttcagcatagctcctgtcccccagcccctcacacctccttccagttgagccctaggatgtcctcctgtccttcactttcatccccataccggccctttgttctcctgtgtatgagtctgttctgctaataaagacatacccgaaactgggtaatttgtaaaggaaagacgcttaatggactcacagttccacatggctggggaggcctcacaatcatggcagaaggcaaagggaaagcaaaggcacgtcttacatggtgacaggtaagagggcttgtgcaagggaactcccctttataagaccatcagatgtcgtgagacttactggctaccacaggaacagaatgggggaaccaaacccatgattcaattatctccaactggctccatccttgacacatggggattattacaattcaaggtgagatttgggtggggacacagagctaactcatatcatcctggaatcaggccctgacagtctgagtaatcttgccagacgactggccgaggggcagcccagacccttcctcagcctccagctctgagaaagcctctctgctggagcctggttgcaccccaggagaggccccctagctcaggcccttctgcctgtcaggatctgggatgagatcagagacacggagtccacctgtgcctgctgcctttcatcccaagaacatcaatacctgaaccctgaatcctggctgtctttttaataacttagaagtattagaaccagccaggcacgatggctcatgcctgcaatcccaccactttgggaggccaaggcgggtggatcacttgaggtcaggagtttgagaccagcctgaccaacatggtgaaaccccgtctctactaaaaatacaaagattagctgggtgtcgtgatgcacgcctgtaataccagctacttgagaggctgaggcaagagaatcgcttgaacccgggaggtggaggttgcagtgagcagagattgcgccactgcactccagcctgggcaacaaagctagactctgtctcaaaaaataaataaataaaaataaatattagagagaactttgcctgagaccctgaaatccagttgtccataatcagcaggacccccaccacgggactgtgggatgtttaaaatcgcaaagccacctaacctctttggagaaaagctgctatgtgatgtatcagttgaagttcactgttgagcctttgtgatacactgaagaaaaatgaaattattcatcctttgtaggtctgttaacactttaattctccgaagattcctttttttttttttttttgagacagagtctcgctctgtcacccaggctgcaagctctgcctcttgggttcatgccattctcctgcctcagcctcctgagtagctgggactacaggtgcctgccaccacacctggctttttttttttttttttttttttttttttgtatttttagtagagacggggtttcacagtgttagccaggatggtctcgatctcctgacctcgtgatctgcctgcctcggcctcccaaagtgctgggaccacaggcgtgagccaccccgcccagccgaaagattccttttaaccagtgccttcctcagggtgctaaataaaaccgcaggtaccagaaacagccagtcagccatgcacattctcagcagtgagacagaggaagtgggtggggagaagacggaaggaaggatagcaccagtgtctctgaaagaggtttccgtttctgcttacatttcattgaccaaaatgtagtcacatggccacttgctgcaagggatgctgggaaatgtggttttcattcctagcaaccatgattccagatggaagttagggctgctattacagaggaagaagtgcaaagtaacgctgagtaggcaatgggaagtctgatcagaaatgctcactccctcctttttcctcccatggcactttgtttcctcatctatagttcttactctatcctagagaaaggaacagaccctcagctttgtgaagcctcttattcatatttgaaccccccacagccctggcaaaggggggcttgaggcctgtatcagactgttatttattgaacacctacactcaagggggccagacagtttccgacttattataagttatatgtttaggatttaatatttataaaaaggtattggtatatttgatttaaagataaagaaaaagaggttcaagagaaggtaaatcaagtgttaagccaggatctgacttcagtgggctccaaagcctgtctttcaaaacaaccccaggggttttcaaatcatgcctgatggctttcaaggttctaagagatggagaagatggaacaagagcagacaggactccaggtgccctccctctctttaagcagggccttttcacatttgcagagtggggttctatatgtgctttgcttaaacaaaatttgcacaactaaaaatgtttggaaaccatggagataaaaaccatgctgacttgagtggcaggatgttaaagtgggagagaaaccgccagcgtcctcacccatttctcacctagctgtcagcctagtgcctgctgtgggtccccccacaccccaccctcccacccaaatgactgttcaatattgctctgaagttccatcccaagtaaaaagcagttatcatcaaaaaaaccatacctctttaagggagtttgacccaagtcataaaccatggaagagacttagaaatggcattttccccatggtactaatcaaaatggtttaaaaccacaaaagccagaaaactgcatgaggctgcaggcagaagggtgggtattgatgacttgacaaactcctcagccttctctctctggcggtacttacctttagcttcctgcagttgtgatatatcacgtctgtctccgctgccagtgggctccaaggggatgtgttcacagggcacattttcctggtgtctgctgatgctctggtgaaagtttgagagctcttccttgtctctcatccaagatataatcaccaagagctataaagaggttttggataacaaaagcttcctgacttgggcatttaacaagacacactgtagaattcccaaccacaactaggtccaagattcagaatcaagaaacgaagtcaatctgatattgctattacaacccaaatgcctcctgtggttggatttttatttgatagggcctggcattgggtgagggatggagacaatttagctagaaaaagaagaatgagaacagcattgtatgtgaggaggtgaagcggacaaaagcatggcaagagctgattaattaaagagtttgtgcaggggccagacgcagtggctcacacctgtaatcccagcactttgggaggcagaggtgggcggatcatctgaggtcaggagttcaagaccagcccagtcaatatggtgaaaccccgtccctactaaaaatacaaaaattagctgggtgtggcggcacatgcctgtaatcccagctactcgggaggctgaggctcgagaatcgcttgaacctgggaggtggaggttgcattgagccgagatcatgccactgcactgcagcctgggtgacaaagcgggacttcatctcaaaaaaaaaaaaaaaaaagagtttgtgcagggacaccagggaaaccatgctgggaggtttgggatccatttcaagcagatgggactttgctctgtagtaactgtaaaccagacatttctgaacaggggagtgagctggtggccctgggatttaggaaaacaaatctactggccatttatggaatgacatcatcataataagaagaacagcaactacctaatgagtaatcctgtttaatgctttacaacattatgccatttaatccttgcaacagctcaacgaggtgttttatagagcaggcagttaagactcaggttttggttggtcctagccagcagagacttcctgggcacagtgtgccaggggctcttctcacatctgaggacagagctgtgaacaagatggacaccggccctgttctctgagggtttgcaactccagggagacaaatgtcaacaaattattacactaatttcattacagttgtgatgattgctatcagggagaagtgtggatgctgtgggagaatcagatggggagggagtggctgagcctacccttcggagtctggaaaggcttcccagagaaggggcagtggagctggctggaataagcaggaggaaagacaaccagggagggtcagcagggaggagggatggctggaggcttcccagcagaggtaacagtgcttgctaggaggtcacagtgtcttctggtggccaagaaggaatctagctcagctcagcttgacttcaagcccatggtctctccttgtttctagagacatgctctctcctcacacaggcaggccagctggtctcaaataattgaaaagaaaaatctgattaaactctaaggattgagtgggctctcttccctctcatctctctcaccacatggcatcttgaaaactctggatagagtgagtggtgcttgcctataatcccagctactcgggaggctgaggcaggagaatcacttgaacctgggaggcggaggttgcagtgagccgagatcaccccactacactccagcctgggcaacagatagaaataatgaaaaacagcactgtttcaagccatgtgattttgccataatcgtgggctaacctgggcacgtcacacatttgatatggcattgtatctagaaaggatgcatctagtgggagcaggtcacttggagatgctgagaacagatctccctccccttccccttgccagccccggtcctcccaacccagttccaggtgccagaaaccaagagggcctgggcagctcacaggcagcctgaggacacaggggtccctgtcggagacaatgaccttcctgtctttaagattcttatggtcaggctccagccctgagacacattctcttgattcttaaaatattcttaagaagcagcaaataatattcacaatttatagatgtagacaatgaggtccttagagaatgatcagagcccaggagggacgggaagcctggctgtggctgcactcggtgtgttttgcatgtggacacactgatgcagccttcagctgtgggaggaagtgactcccttagtgggaacagcctgaggtgggaggggttacacagtgtcataaggggctggcaggggcttagagatcaagcccttttattttacaacagagaagcagagagtcgatcacatggctggtgggtggcaggggtttctgactcccagctcactgctaattccgctcctccacatgactctgttgttagctaaagagtttctcctgaattatgaatgagtgaaaggaaattacgtacgtatggatgtgctcatgggcatgtgtaaggcagagggagattcacagagagtgtgcaagtacctgtgctgtgagaatcgggattgctttgaaacactgactcatagtcatcctagctctggtaaatgtgagttcagctttagaaacaagcatatttaatccattcataactaggtttcacttttcacatgcctctggcagggaatgacaagaccaagcacgatgtcctcattggagaactctgcctgctcacaaaggtgtctggccagtgcttcttggcatgctctgtctgcttaggagcaagacttttccacatccatcatgtcttactgttgatctatcacatctgcctgctgcagctgcaccaggctccacgcatctgtcttcctgacaccttcgccgcagctggagagggagtggctagtgtatttattatttttgtgagcacagaccactgtgaggctctgcaaacctgccactggaaagctccatttttcttcctttctaaggcgaatctatgtgctttggatcaggagcagctcccgaggtgtgacttaggctgcctgctgccctctgtcttgtatgactaaaaggccccctaagaaacacgcccgagccaggcccctgctgcctctgctccatcctggaaaagtgaaaagtgcccacagcaagccctaggtaccaggaacagagcccactttgccatctcagttatctctttccctccacagcaatcgtcctgagagcctcctccttaaagacaaaccagccacctggctcagcccttcaacactgtagttgaagggaaagtgtttccctgacctagctcaaaggactctaggttcctgtgaatgatgctgttaattggtctgggttttccccgcttcctgtcaaatgcaggaaattagatttgacctctgctctgatcactctaaaattattcttggcactaaagacttccagcctttgtaatcagagcatctattttcaccctgattaacgccaatgttctgatggggcaggatccaaaggcaatgtgatttccgtgattcctcgtccccatgttgagtgcagatgtctttaaatggagtgaaatcatctttaataagcgtggatcagcattcagatggctccagggtgcattaacagattcccagaaaaatgccctgtgccaaaccgccttatgggacccttccaggtcccacaaggaagaggcagggaaaatctcaaagtcaatccaattctcagccaaaccattatgtgtttaggacagacgcagaaatgtgatgctgtattctcctcagtgctaatggagcagcatgcacgtctcaggcacattaaaaggaggaaggagacagagacagcagaaagccactgtgccccgagatctaaagaagggaaataaagtgaaggcttctcaacttctaactagaattcttctgtaggaaagccgcttcattgttcagagccttgtcttttttctagccttaaaatagaagtaaagattacacacacaggcttttgtataagttaccgagactgtgtctgcagagtatattgattcatctcacatttatcaagtcctatttataaacacagtcatgcgtcactcagtgggatacattctgggaaatgcatccttaggtcatttcaatgttgtgtgaaaatcataggttgtacttgcacaaacctagatggtatagtctactacacacctaggcggtgtggtatagcctattgcttttaggctacaaacctgtacagcatgttactgtactgaatactggagaaaattgcaacacaaatcactaggcgataggaactagaatcattatcatcttatgggaccaccgtccttaggcggtgcatgactgtatatgtactctgagccatggaggagtcaatgattataacccctgtcatgagaggatcacatttgtatttttcatcaaatgcttcacctagcacctggtacagaaaaggtgctcaatcaatgtttgtggagtgagtgggaggaatccttaggaaataaaaatctaactagaggttatagagaagttcataaataattgtactacaaagtggaatgtgaaagcaccttaagagatagatgaacaaataaagatgtaggaataaaggggtaggaagccgggtgctgtggctcatacctgtaaacccagcactttgggaggccaagatgggtggatcacctgaggtcaggagttcccaaccagcctgaccaacatggtgaaaccccatctctactaaaatacaggaattagctgggcgtgatggtgggcgcctgtaatctcagatacttggaaggctgaggcaggagaatcacttgaacccggaaggtggaggttgtagtgagcagaaatcaggccactgcactccagcctgggcaacaagagtgaaactctgtctcgaaaaataaataaataaaatacaataaaataaaggggtaggaaggtgacatgcaggctgcaggaagcacagaacatttctgttcacgaaggcatcaggtggaacatgagtgggaaggagagagggtgaatgccttctaggttgaagtcaaagcaccagccacaggcagaggaaggaagctggggagacattcggtcggtcacaacaagtgtacccagacagacaggtggtgcacaggagagcagggatgtggggaaggtagggaggctcccgcccttggcggagcacctgacataggtcagcctcggggcagggcactatcccatttccatccttacacctgcccctccaggtagaaagcactgccatttcacacacgatgagctacatcctggtccaatcaccagcaaggggcagctccaggatctgtccctaggtctctctggcaccagagctcttctccccctccattaagaaggaaaaatattattaagaccaagagagcccttgaccttgaggtagaatgaagactcagtgtgttggtaagggagacccattgggagatgggtcttagggagaatgtgaggcagcggcagttgtaggcagtaggaagaaaaggacatggcccaaaaatacccattaggaacccatggcagggggttaggtggcaggctctggggctggggcagcaggggtggaagggcatcagcatcagaggcattctcccaagagcttcagaataattaaatgtgggaaacacaaaaaggggaggacaaagaggtgggttcctaaaatgggggagataggaagaggagctggctctagggaaagaggatgaattagtctgggacatacacacacaaaaaatcaaccctaaatattgccggccattgaactcattgctgtcttcctccttcactgtcctgagccttttcacctgctgcatgggaaatgccctatgcaaccatttcccaggaagcagctatggaccagatataggttaggccctttgcggtcagggagttcacagtgtagtgggggagacccaggcaaatgctctgacagccccagagggccgtgcaaggactcaatgtgtacctggggcagtgagtgaggggacatcttctttctgcatgtgtgaccagggatggctctgaagatgctgaggcagacttgcattctgcagagaccgtggagaagaacgaaaagccacctcaattctgccatgcctctatcctctcagtgtgaaggccatggaggcagaaaggaccccaagtcactggcctcactgacgcgatgaggctcatttgggcactcatcttagcacacttgccctggtcaccaagtacccaggctcaggaggccctgggcccgccgagaaagaactgagcaggagagtcttgaaaactccaactagggtgggaattccagcctgttgaagggaatccactgtctagtgcttcctctcctgggagagcagagagctttggcatacatggggagggtaatatatctaggagtggccttctgcactctgggctgctgatagagctgccactcacagcctttccctatgacaggaggtcacttgggccaggtccttggactcatgggcactgaggatcccccttccaggctaggtgggggcaggcagcaccaggtaggtgcaaggccctgtcccactggctcatggtctccctctctgtgccccatccagcctcaagcccttctcaggatgcgcaggatgccaggcggccacggagcaggaacccctccgcctggactgtggaggacgtggtgtggtttgtgaaggacgccgacccacaggctctggggcctcacgtggagctcttcagaaagcacgtatgcgagtggtgggtttgaccttgggggggattgagggagcaggcacagaaggagagtgaggtccagggagctgcgggatgctgccaggggaggtggtggaggggtgctctaaactaagccctaggggcaccctcaagggagccagagatgagagggacaggtacaaccacaggctcctcagagcagaatgaccacttaatttgtttttaaaggaatatttgccccatctcttctctcatgttggccttcgtcaggagtgcctgtttcctgcccatccagccgtctgtgaatgcaacaaacattcacagcacaccaacgacatgccaggcaaaccgcagtagcacctgttcctaaaccacttcgaggattaaataagaaaatgcacaaaaggtgttcagcacggttcctgactcggatagccttcactgagcagatagcattataatgattttgagatatgctaaaatatagagatggtaattttttttaaagataagaatcaataatttacctgccaggcttactatatgcattttgtttttgtttgtttttgtttgagacggagtctcattctgtcgcccaggctggaatgcagtagtgcgatctcaatctcggctcactgcagcctctgccttcccagttcaagcaattcttgtgcctcagcccacccgagcagctgggattacaggcacccaccaccacgcccagctaatttttatatttttagtagagactgggtttcaccatgttggccaggctggtctcatcccaaagtgctgggatgacaggtgtgagccaccgcgcatggcactgtactcattttatattgtgctgtaacagattaccaccaacgtagttgcctcacacaatatacattctctgtcttaccactctggggatcaggagcctggcatgggtctcagtgggctcagccagcaaggctgcctttccttctggaggttctagggagaatccgcttggttgtcttttctggcttctagatccaccatcagtccttggctcctgtccccctgccatcatctttaaagcctgtaacatcaagctgaggcctgttcggctgctcgggctgccatccctggttctcactgctgatgtcctcttccacgtttaaggagctttgtgattacacagccgccactccccccacccacctggccccataatccgggataatctccctactttaaagtcagctgattagcaagcttaatcccatctgcaaccttaattccccttcaccgtgtaacttgacattcacaggtttggggactagaatccagacgtcgtgcatggaggggaaggagcattattccgccttccacagtgaccattatttttgtttcctgtttcttattttatttggtgattctgtcatagaaatcatgctctccaatcttaggaggattctcatctaactcagcacttgccttttattaggcatatgttgacctcacctaacaatggggacttaagaccaagaaccacagagtgggttatgcttggacagatttgggcagggggagtctggctgtcttccagggtgggaggagacagtgggagtccaggaggtgagggaaataaaagacagtagaaaatgaggctcctgggagtggcccacaagtaagccttgcccactgccattttgccaaagacatggagagtgacacagagtgggtgctccatcaatactggctggctgggcagatgaatgagagagctggtgaccctggcaccattatatgaatcctgtaactatgtcttttctccctgcttgagcacctgaaatttctaccctttgtctccagtgacctgaaaatggcactaaaggtgaccatggaagcccagccttgctaggttcatgaactccacatgcattctggagggtgaccattttcaatgaccaatggcagcaacaccgggaccaaacctcaaaggactggctcatcctcttagtagttctttgtgctgaaccctgagatgaagcaggggcattctttagtgtattccttctagtggaatagacagggctaaacacacctgaaatcttccataggtggaatgagttgctttgttatcagctaaaggtaggtgggcctactaagaaatgagaaattagggcaataggtggaggtttggaatggaaagaccctctagttccaggttctaatggatgacagtttttgcccctttagccaagtttggatgaggagataaacttcctaagtgggatattgggaacacacatgaggttgtgtttgattccttctatgaggggagggcaggaatatgaaacaccccgtgtatcaaatgactccagggagatgatggggagaggagaacacagtatttgtttgctttaatattttaaaagaccttgccccaggaccaagagaatatgctgcctaaatcaatccatatgccctgagcacaccccttgaccacaccttaaccttagccactgttcgatgactctgaccatcttctgggtttatctttcttctgatcctatcccaccaggagattgatggcaacgctctgctgttgctgaagagtgacatggtcatgaagtacctgggcctgaagctgggacccgcactgaaactctgctaccacattgacaaactgaagcaagccaagttctgacgtttttaaaaagacagaagcgaaacccaaaacaacagatcccaagattatcttctgccttaccaatatcccgccaacatcacaaaatagactctcctcttaaaattaacagccacagagacgtggtctttttataaaacttgtgaatctttgccttttgaagaatttaacatggaccttttcgagaggctcctctgtgttcataatttgccaaaaaattacaaaagcctgtgatttttaacatccctgttatgctgatttctcttaaagtgggtcctatttgcataacgagagagtggggaactgaatgcttatgcccaaggagagttctggagggttcaaaggatgaaagaaggacctttgtccctgcggtctctgcagggacacccccctcaacaccatctgcctctaactctgacctggggacctatccctgtgagccttgtttgcctcagctctggaagctgacttctgaagatgactgcctcaccttgcactgtctggaaaacttgaattattttacgccgtgaaagaaaaaggaaaaaaaaaaaaatcttttctgttcctagaaaatctgaagtactgtgtttctccgctagagggcagactgctaatgaaatttcaggaccctcactgactgcagtagcaggattgttcagtactgagtggatgggttagggtgtctgtgaacaagatctagcccacacagaaacaggggatttattccacagttagcaccacagattgcgacttgggaagaaaccatcagctagaggggtctagttcgtatccaatcattattgactgactgactgatactcaactagcaaaggcaagaatttggaagcacgctctacccagatgggactttggagttccttcccttccagagtccttattgaggtgttgaagtgttggcatgccgaagaatcttagtgacatttagccatgggtgtttctttaaaaaaggaaaagaaaatgtctcaacgaagctttgaaatgggagagtgttgatttctagttacattgctgggttatgtagttgtatctgtggctaatttttctagtcctcaacaaatacacagacatgctattatggggtttaattcaatttacaaataggttttccttcctcacagtggagtaatagaaaaaattgattttctgctcctttgcagctgtgtccagagacggacaatgaatccacaatttattaggcagaggcacaacttctccaccattcgttttatccttctcttttctctgtttccctccacctctcttcttcttctttcacactgagcagaaaacatatcttcaaaatgaattcgcctttgccatgtgcatattctcttccttaaaaggacatcaacagtgttggagatgaggagatgaacattagattttggaatttctgggagggagagggttagggatgactcagggcctcccttcgcccaaaggtgaatcagaaaaggcacccctttctctgggatacaacctgagcaggggtctcagctggcaagtggagcagggtgggggctcaacctcctcaccgcttgatcagctgccgttgtacagagcatgacctgtataaccttgagggcagccctgggtagatctgcagagtgaccctctatatagttagaatccagatgaaggccataagaaatagtccatgccatgccgttaggcccactttcatgtgcagtacttgagaaagcacatcgtagcctccttttcagacacacaaatggcggctggactgagagcatggcagagaaggggaggaggagaatgtactaaacttgctcactgaattgagcttgagttattagattgtagaagagcttgatgtctggtgattttgttacaggaagggggtcccgatccagaccccaagagagggctcttggatctcatgcaagaaagaattcagggtgagtccataaagtaaagtgaaagcaagtttattaagaaagtaaaggaaggaaagaatggctaccccatagtcaaagcagctctgagggctgctggttgcccatttttatgtttatttcttgatatgctaaacaaggggtggattattcatgcctcccccttttagatcatatagggtaacttcctgatgttgccatggcatttgtaaaccgtcatggcactggtggtagtatagcagcgaggacaaccagaggtcactctcgttgccatcttggttttggtgggttttagccaacttctttactgcaacctgttttatcagaaggtctttatgacctatatcttgtgctgacctcctgtctcatcctgtgactcagaatgctttagccatctgggaatgcagcccagtaggtctcagcctcattttacccagctcccattcaagatggagttgctctggttcaaatgcctctgacaggttcagcacctgagaaaagtaccttgaatcaggccttggggcagagtcttcaagattttaaggtgatagggcctgtctcttaagaatttattaatcgtaagtgctcactgctggtttagagttagatacatttccctcaaaacagccatgggcaggttatgtactcagaactgccagggtgaaaacaatgagatccagaaaaatcccacaacaatccaggtttttcactcctcttttttttctcaatcttccgatacttgtggtacctcttccatcaacagatacctcatgtagtgacttccagtatcaagttttcaaaacttcctacccaccctcatcagtgcctccttcactacagagtcacaaacattggtgctctcaaataaaaatcagccccaaacaatgtcaaagagatcccttgagtagttttcaggcgagagatatgttctcatttcaagtcttggagaaaactggatccatgttcacgtggaacttctctcgcggaggtgctatctcattttgcattaaactttaagcaggacagattgctgaagccatgatatttaaggtttgactttttaaaaatctcattactcttaaaataaatgctgccacatcagagaataacctggggaggaaaatcttccttgactgtttctgcactgaaatgcaattagccaactaaattattgtagcaatactgcaattataattaattttcacccctctcaaaaatcttgtcaaaccaggaggctaaatagcttcacaaatgtaaaacacaccaggccatttcctctaaacagaccttaaagggttaggccacgtgggtcacccttgtccaaatgagagccgacctgggggcctctcacttgtacagatgtggtacttattattccattgcagtagctttgcttcaggttgtagtgaataatgatatcgttttgcataattccaaattagagtgtgtgtgtgtgtgcctgtgttcatgttccaaacatttccaattacacttgtctgttaaacacttgaaagaaaaaatcaagagacaattctattgcctaaggccttttaaatatttcatgaatcacattattccctgtgcgaagactttaggtgaaagctgtgggtcttgtctgtgtgtgtgtgtgtgtgtgtgtgtgtgtgtgtgtgtgtgtgtgtttcctgacactgtagctggaagagccttaggaagtgagtgcttgggagtatatgagccattgcctttgcttggtttgcaatatggaggcagaacccactgtggtctggttgctactactaagtgtcccctcttaggctactagggtgtgccctggaggcagctgggtgaccagggctgttctggggctctaggcctgccccctcaggaggatgattgtatgtgccaagcctgggctccaggtgactctcgggagacacattgccggggagcccacggaagggaacaattgtcttgcgggcgtttagcacctaccagagagtacaccagactcccaccatttccctgcagcagggctgctaccaactatattaaatacattgggaaggaatatgggactagggccggtttactgcagaagaaaccagtgagaaagggaggcctacaccataagtttcttaggaaaacaatgaaagcagcaattctaacagccccaacccttcacgctgcaataacctatttttgtatctatgtgccgtatggaatatttcttatttttttaattaaaattctttttaaattatttttgagatggttttaggagaattttctcaaatctctgaagataattggagatgcccataggtgaccagggactcaaatgtagtcattgtcagaaggtctcaaaagatggaaatattctgctctcattctaaagaaacaaccaggtttacatatatgtaagtggttggcaggcactgtctgacctctgctctgaaggggccacttctcagctcttctccactggggagagaggggaaggggattggactcacttttttttaaaacctcggataacaagacatgggattgtgaaggagtaggtgatttttttaaaaactgcaatttttttttaaggagagggctgcaaacctgtccatggggctgattttttttagttttgtttttggttttttttggtcataaacactccaagaactgagcacctgccaggctctcctgttgccttgccatgtgcccctatccctcccctgtggcaagagaggaccacactaagaaccctggggatggtccagcagacggtcagacatccaggggaacaaacctccctgtttccattctgtgatgtcaaacccagctgcatcacccccatccacccgcaggcagcttctgtgtgttccgccctgctcctgcaggtagagcgctgggcacctcagcttctggggtatcatccactccaatggttgtcctaatccaagatgatccctgcacagaaaattagaagctggatttttggaaatctagcatttgcttgaaagagaatggctgttatttactgccaccagttaaggatcatgaaaacatgtctgctaacaatggactttgtgtaattgttctaatgctaataagcaactgctgggacacttcccgtggtaaattcctttgtggtttcggtggtcttatcacacatgggcctcaccaagatgctgggctggagagaacgctcactgtgactctcccaggcttcatgaaattcccccgacttagaagcagttctgggcaaaaacacactgttagaggaggatttgctttcttcacggtgctttcgcaagtgaggcctcagatctgcgctcttcaaatcctacataaagagcccagaggttctccccatgctcagcactgggctcgctttcctgcagaggaaacgatggcaggtagagcttaagaatgacgttctcccccaggtcggccgagagtgctgtgccatgaattgatagtggcaggacgagaatagtagagacacgggtgattaaacagtgatgccagacagtgtggggacagcagcatctttccatttgaagggtctacatataccacacagaccacctatacctcagctgtcttcccaccctaccctgctctggggcttgaccacgtggtctgagccttagagtcagttccatgcactaggcgcttgcacaggccaacagcaacctcttccattggctccaactttagaatacacccgaagccttgcttctccaaacagctcattgtgaaataacagcgcctcactaggtgtcgctttacagcaatgatgtatgactgaaggctacctctatcataaatgtagcatcctcaactacattcttttcaaagtgttcttggaaacccatcatcatcccttgagggtggattttttttctttttggagaaagccaaagccactgggctcatgcctggtgcatgacatgggtaatcagtttcaggtttcaaatcatgtgttttcacacacattcgtttgtcttttccttgtgtgtttccttacttggtacaaatagtttgaacaataacagccacaattcactggttaacttaaatatattaggcaggtgttagaataaggagctgcaatgtacggactactttgaaggacaacagtatttggatgtataacgttcaacatattcattttaaagtaatgttactgctatatccttaggcacggtaagctgaggatattgtgagtgttcgcaaatatacagagaccaccctcacatgtagaaccgtagaatcctagagttggggaaaagaggtcttgggggacatctggacggctcccctccagagtagaaccttctcccccgtgggttccacattgctctgtggggggcagagcatggtacggtgtgcaagaaacaagctctccaagtcacctccccccatacctccatctccttatctggaaaaggaggggagtcatccacatgacctttgaaagcatttccagctcagttactttggccaaggccagtggggctgtgctgccgtaatggttatgggctgttggctcatctcttttgtttcatggctgctggctcctgcctctcctcctttgcaacctcatctagatattttttgatcctcttccctcatgggcccagaacttctcaaggccatgtaagcaccacttgaccattctttcccactcgttttttacttctcattctattctttcttcctgcctccatgtttttttgctggtttgttttcttttctgtctttcttcattccactagctcaaatgccttggggatggagacggggtagagaaagaaataagaataagccaactctgtcctcccaggcccagcagttctgacctctgcccagctgtcacccacccacagcattccttgactctgccccacttcctgtccaatctccacttgttctatttctcaaggtctagccctctcagctcgatgcctgaggttgggaatgagagtctctgcccttctgaatgtttcatcctgtgactcaccctgatgtaccaccgagaggcctcttgaatcttcatcaagcacaatgcccttctcactagctgtccctcttcattcagccctgaaggttaagtgacctggtgccaattcgatgtacctcttgagaatcacaagctgcttctcccaccatcctgcaacatgcacggagtcactctgcaatccagcagcaattcagataatgccaaagttctttatagaacacagaacgttgtccagacccagttagcactgactgtacagcctcatgaccaaagccgggccagagccttgtgtgtaagtgaggagggtccagccagcatgaaaaatgaaggacaatgaactacatcagaagtatttctggggtgaggtattgtttttggacatttataagactactgagacgtatgcaatattaagtggcttgtgtctgagtagggaaagatgatgacatatttcccaaaagaaaatgtggtttagagggaggagaaaggcagcacagctctggaaaaaaaatgtttccattcctggcctttctacagcacaattgcacacctcgaggtctttctagaagtcaaacatgtttcctcctcaggaactgaaagtatttctgtccaagtgtgagagactttgagggagtttgatttcttttattattcattgtgttctaagccataatatttaattttctgtcatcttctagctatatctttgatcacttggggatttaaatagaagaactcctctcattttatcctcaagaaaatatgaaatatcatttgctttatagagcaaatatttccatgttacagatatctgttgattagattatttctctactgtatatacctagaagtaatttcattaacataaaaattttatactttaaatacatttgtggataaatttgcttttcattctattcacatgcaagaaaactaaactgattgaataaaatcattttatcataattgtcttgctgctatttttttttcactaacagtgaaaactttgtgttaatgaagtatgactgtaacaccatgaatcttctcccttcatggggccaaaaggtgtgttttactagctacgctaggctgtcattatccaacaagactcctgctaacaaatgagggcccatgagttagtgaaatccatgttccctaagcttgtgaggtagaatgacgatgactgaaatgttatgtctttggttttgtaagttgatgggcttattttcagaatctttctttcaactcagccttagttaatctcatgtttccacctgtttatgctacttccgtaccccatatacccactcgggaggcttcccgatctcgccgcatctgggagagcggcagctgcaccttttccctggtaaaacgtcttactttactcgcacactgcatgaaacagccagaaaccaagggtgcaaataggtcatctccttatcctgggaagataaaaacagggttgactaccttccctcttctctactgagacagtatttcctcccttctaattaaggatttttagagggggtgtgcgtgcatgttcatgtgtatttcgattgggtttgcaaacttaagagaaaggtcattagtgaaagtttgcacatcatttgcttgtgctgaggcacgtgtgcaagaaggactcggcgtatgtactgcagatattctaattgtatgaaaattcattgtgctttcatttcttatgaacgtaatggaatcttggaacattagttcaactccatcttttacttggaagtgctcggggagacagaaactttcagcttaggaagtggtgtaattttaggtcctagcttctttacaaaacaaaacaaaaccagtggatctaattttgcagactagacattagtgaatatagctcattgtaatggtgagtggcatttacattgcagagagacagcggtaaaacctgttacctgaggaaacagcctctccttaatctttgctctttgcaagcatgctgaaatcagtgtttcctaatactgggacaatcctttcacctcaaagtgttcctatgtaattgtgttacataatgggaaattgtaataggcaatttggttctgtaatttagtttgcaaagcatgcaaacataagataactaggttaaatgcaaattggcattacactaaggtaccgagataggaaaaaaaatatgctgtgtctataacttagaaacaacatgaattttattccccatgcgcctcaaaatgtagagtttattaaagttatttatcctctagtttaatttcatcacatactgtgcatacagatacattatctgagtatgaacccacgtgtattcttactgcatatatttacagatctctcatttgtcataagcaggctgtaagtgtagcgtgttacttaggagtgagttggatgtacttatttttatcatatacagtgttttcataaattgaccattatatataagacactacatcaaaatgtgctttgaatctttcaaagcctgttattgtttgtaacttttgcaggagggctattagttcattatttagaggtcaatttttctgtttttaatgtattctcttaaacagtgattggtatgtacaccacagtcaggtatgtacaatttaattaaacaaccactactggccttaatgattttaatagtttgaggtggtttttgtttgtttgttttcatttttgatacagcttttttttctagtacagtgcatcatgggcctgtgtatgattcagtgagatttctaaatcttaagatttcaacacaatgtagtactttctgttcatgctgtaaaaagtatttctgtattttaaataaagaataaaatttatgtgagcctgtatatattttatctgatcaacttttctatgttgattactatttcattaggactggttcccacaggtagagagcaaggataagccttttcaaggtggtccttagactactgaagccacaagggctgattcactgctgcctggaaggcccctgtcacctggagacctgctgcacttcagggcagccagctcagctcccacactggctcaggagagacttttttttttttttttttttttttgagacagggactcactctgtcgccccggctggagtgcagtggtgcaaacacagctccctgtggcttcaacctcctgggctcaaggaatccttgtgcctcagcctcccaagtagctaggactataggtgcacaccaccacgcctggctaagctgtgtattttttgtagagacaaggtttcgccatgttgcccaagctggtcttgaactcctggtttccagcaatctgccctcctcagcttcccagagtgctgggattacaggtgcgagacactgcactcggcctggagagacttattacaggaggccagggttctctaagaagcttactctgtccccctgaccttcctatgaccacaaaggggcggtctggtgcagggaagaaatgtgagatttgatcagagtccccagaggagtgtccacccagggtcatcttgggccagtctctcctctagggtctctgatatggtttagaactgtgtccccactaaatcttatgttgaaatgtaatccccagt

SEQ ID NO: 2547 - DNA, 534 bp, Homo sapiens
catctctctggttttccagtctcggcttcctttgatggcaaacagcacctgcggagcctgcctgtggtgaacagcatcggctatgtcctccgcttcctcgccaagctgtgccgaagcctcctgtgcgatgacctcttcagccaccagcccttccccaggggctgcagtgcctctgagaaagtccaggagaaagaggaagggaggatggaatcagtcaagacagtcaccaccgaagagtacctggtgaaccctgtgggcatgaaccgctacagcgtggacacctccgcctccacctttaaccacaggggctccttgcacccctcctcctcgctgtactgcaagaggcagaactctggagacagccaccttgggggtggtcctgctgccaccgctggtggtccccgcactagccccatgtcttctggtggcccctcggcacctgggctgaggcctccagcctccagccccaagagaaacacgacctctcttgaaggaaacagatgtggtaatgtaatgcatgcatcagcttcccac

SEQ ID NO: 2548 - protein, 110 aa, Homo sapiens
MESVKTVTTEEYLVNPVGMNRYSVDTSASTFNHRGSLHPSSSLYCKRQNSGDSHLGGGPAATAGGPRTSPMSSGGPSAPGLRPPASSPKRNTTSLEGNRCGNVMHASASH

SEQ ID NO: 2549 - DNA, 2034 bp, Homo sapiens
atgcattagtctaatgagatgtttgcagctggagcgcagggctgctggagactaactgtgagctactaacacgggtggaagatagcttttgcaatactcggtttgcatgtgctgaaagtcatctgtcttctgagtcaacactcccgacctggtaaacaacctgctcagggctctggtgaacaagctgtagcacctcttctgcctgtgagcgatttgtcacctcattctgtaagactggcaccagcagaaatgcagtctcaaaggatcccggggagaaagcgaggccgaccctcacttcactccacgcctatgaagatggcagttcataacctttattctgcttcagctggctctttaccagcagtgaagatcccaaagaaaagagggcggaaacccgggtacaagatcaagtctcgggttctcatgactcccttagccctctcacctccgcggagtaccccagagcccgacctcagctccatccctcaggacgcagccacggtccccagcttggcggccccacaggctctcacagtctgcctctacatcaacaagcaggccaatgcggggccctatctggagaggaagaaggtgcagcagctcccggagcattttgggcccgagcggccatcggcggtgctgcagcaggccgtccaagcctgcatcgactgcgcccaccagcagaagctggtcttctccctggtcaagcagggctatggtggtgagatggtgtcagtctcggcttcctttgatggcaaacagcacctgcggagcctgcctgtggtgaacagcatcggctatgtcctccgcttcctcgccaagctgtgccgaagcctcctgtgcgatgacctcttcagccaccagcccttccccaggggctgcagtgcctctgagaaagtccaggagaaagaggaagggaggatggaatcagtcaagacagtcaccaccgaagagtacctggtgaaccctgtgggcatgaaccgctacagcgtggacacctccgcctccacctttaaccacaggggctccttgcacccctcctcctcgctgtactgcaagaggcagaactctggagacagccaccttgggggtggtcctgctgccaccgctggtggtccccgcactagccccatgtcttctggtggcccctcggcacctgggctgaggcctccagcctccagccccaagagaaacacgacctctcttgaaggaaacagatgtgcctcaagcccttctcaggatgcgcaggatgccaggcggccacggagcaggaacccctccgcctggactgtggaggacgtggtgtggtttgtgaaggacgccgacccacaggctctggggcctcacgtggagctcttcagaaagcacgagattgatggcaacgctctgctgttgctgaagagtgacatggtcatgaagtacctgggcctgaagctgggacccgcactgaaactctgctaccacattgacaaactgaagcaagccaagttctgacgtttttaaaaagacagaagcgaaacccaaaacaacagatcccaagattatcttctgccttaccaatatcccgccaacatcacaaaatagactctcctcttaaaattaacagccacagagacgtggtctttttataaaacttgtgaatctttgccttttgaagaatttaacatggaccttttcgagaggctcctctgtgttcataatttgccaaaaaattacaaaagcctgtgatttttaacatccctgttatgctgatttctcttaaagtgggtcctatttgcataacgagagagtggggaactgaatgcttatgcccaaggagagttctggagggttcaaaggatgaaagaaggacctttgtccctgcggtctctgcagggacacccccctcaacaccatctgcctctaactctgacctggggacctatccctgtgagccttgtttgcctcagctctggaagctgacttctgaagatgactgcctcaccttgcactgtctggaaaacttgaattattttacgccgtgaaagaaaaagg

SEQ ID NO: 2550 - protein, 412 aa, Homo sapiens
MQSQRIPGRKRGRPSLHSTPMKMAVHNKASAGSLPAVKIPKKRGRKPGYKIKSRVLMTPLALSPPRSTPEPDLSSIPQDAATVPSLAAPQALTVCLYINKQANAGPYLERKKVQQLPEHFGPERPSAVLQQAVQACIDCAHQQKLVFSLVKQGYGGEMVSVSASFDGKQHLRSLPVVNSIGYVLRFLAKLCRSLLCDDLFSHQPFPRGCSASEKVQEKEEGRMESVKTVTTEEYLVNPVGMNRYSVDTSASTFNHRGSLHPSSSLYCKRQNSGDSHLGGGPAATAGGPRTSPMSSGGPSAPGLRPPASSPKRNTTSLEGNRCASSPSQDAQDARRPRSRNPSAWTVEDVVWFVKDADPQALGPHVELFRKHEIDGNALLLLKSDMVMKYLGLKLGPALKLCYHIDKLKQAKF

SEQ ID NO: 2551 - DNA, 1879 bp, Homo sapiens
atgcagtctcaaaggatcccggggagaaagcgaggccgaccctcacttcactccacgcctatgaagatggcagttcataacctttattctgcttcagctggctctttaccagcagtgaagatcccaaagaaaagagggcggaaacccgggtacaagaaacctaaggcaacaacaaagacaaatgccctgccagagaacagcttggataggttgcgacaggcagagaacccccccattccactggagagagatcaagtctcgggttctcatgactcccttagccctctcacctccgcggagtaccccagagcccgacctcagctccatccctcaggacgcagccacggtccccagcttggcggccccacaggctctcacagtctgcctctacatcaacaagcaggccaatgcggggccctatctggagaggaagaaggtgcagcagctcccggagcattttgggcccgagcggccatcggcggtgctgcagcaggccgtccaagcctgcatcgactgcgcccaccagcagaagctggtcttctccctggtcaagcagggctatggtggtgagatggtgtcagtctcggcttcctttgatggcaaacagcacctgcggagcctgcctgtggtgaacagcatcggctatgtcctccgcttcctcgccaagctgtgccgaagcctcctgtgcgatgacctcttcagccaccagcccttccccaggggctgcagtgcctctgagaaagtccaggagaaagaggaagggaggatggaatcagtcaagacagtcaccaccgaagagtacctggtgaaccctgtgggcatgaaccgctacagcgtggacacctccgcctccacctttaaccacaggggctccttgcacccctcctcctcgctgtactgcaagaggcagaactctggagacagccaccttgggggtggtcctgctgccaccgctggtggtccccgcactagccccatgtcttctggtggcccctcggcacctgggctgaggcctccagcctccagccccaagagaaacacgacctctcttgaaggaaacagatgtgcctcaagcccttctcaggatgcgcaggatgccaggcggccacggagcaggaacccctccgcctggactgtggaggacgtggtgtggtttgtgaaggacgccgacccacaggctctggggcctcacgtggagctcttcagaaagcacgagattgatggcaacgctctgctgttgctgaagagtgacatggtcatgaagtacctgggcctgaagctgggacccgcactgaaactctgctaccacattgacaaactgaagcaagccaagttctgacgtttttaaaaagacagaagcgaaacccaaaacaacagatcccaagattatcttctgccttaccaatatcccgccaacatcacaaaatagactctcctcttaaaattaacagccacagagacgtggtctttttataaaacttgtgaatctttgccttttgaagaatttaacatggaccttttcgagaggctcctctgtgttcataatttgccaaaaaattacaaaagcctgtgatttttaacatccctgttatgctgatttctcttaaagtgggtcctatttgcataacgagagagtggggaactgaatgcttatgcccaaggagagttctggagggttcaaaggatgaaagaaggacctttgtccctgcggtctctgcagggacacccccctcaacaccatctgcctctaactctgacctggggacctatccctgtgagccttgtttgcctcagctctggaagctgacttctgaagatgactgcctcaccttgcactgtctggaaaacttgaattattttacgccgtgaaagaaaaagg

SEQ ID NO: 2552 - protein, 385 aa, Homo sapiens
MPCQRTAWIGCDRQRTPPFHWREIKSRVLMTPLALSPPRSTPEPDLSSIPQDAATVPSLAAPQALTVCLYINKQANAGPYLERKKVQQLPEHFGPERPSAVLQQAVQACIDCAHQQKLVFSLVKQGYGGEMVSVSASFDGKQHLRSLPVVNSIGYVLRFLAKLCRSLLCDDLFSHQPFPRGCSASEKVQEKEEGRMESVKTVTTEEYLVNPVGMNRYSVDTSASTFNHRGSLHPSSSLYCKRQNSGDSHLGGGPAATAGGPRTSPMSSGGPSAPGLRPPASSPKRNTTSLEGNRCASSPSQDAQDARRPRSRNPSAWTVEDVVWFVKDADPQALGPHVELFRKHEIDGNALLLLKSDMVMKYLGLKLGPALKLCYHIDKLKQAKF

SEQ ID NO: 2553 - DNA, 122637 bp, Mus musculus
  misc_feature (1)...(122637): n = A, C, G or T/U
acataatataaatgaccataaactccaaggttgatgctccccttgcctttccagtactaaaacaacctggtaagctgcaggcttcacttagaagcctataagtgcaagagaggcctggtcaggaagccttagctgagcctgccagtgtgatgtcttcctcactggcctgtctccccccaaaagtgggaagctaacatcagcccaaagtcctgcaagtcaaagaaagcttcaggctgatgggttttcaacaccattctatatcaggaggtggggtgaggttggagtgaacaatctgccatataaaattaaatgacctcctccaaactcacttctctataaattataatattggatgtattaaggtaacatttggaatttcatgtttcctgaggtaccactcatgtcaatgactccatctttagggcagtgttccatctacttctggggtccacagttagaaataaagctgtaaaattgccaaagagagggcaaaagaactaaaggccagctaaatccgtcccacggtcggaggaaaccacaaactactcttaggagaaataaatgtgtttgcagtttagcaagcactaaattgcaggaatgtgagccattcaacttcacagaaggtggctagctgcattccatttctttggagtaaagatcaaaaggaaaaaaaaaagagagagaaaaatattaaacactttaatgagtttggaagttggtggctcatagtaagtctggcaataactatgaattgactgtattttcactaattgaacacattctaaaatccttttaaagtggggttaaaagtcatagccatgttgttgagttaatactttgtactgagaactcagtcagtccctcgaagagtaaaaattccaaggaaaagcgacattacaacctgcttgaagagatggaatgtctgtgaattaagctacagatgactcttgaatagaggtgggctataccaggatttgggttgtttaaactacgaaaacacttgagggacagacatggttataaagctacgtacaagaacatgttaaattttctctgaaaggcaactggagagaagcattctgatttggtaagctggtggctttgcacagcatgtatccagccaggaaagtttaacacagacaccagcactgtgaacactaggaggtgacaagatcccctgaacatttctaatacaataatcggtttgatctctttggaaagctttgaagccgttaggggttgggattttgttgtatgcgtggaggaaccgaccccgtagtgtatggatttgacagtaagcgtcttgcgtgggtagcagcctccaagcaggtaaatgtatggtgcatcccgcagccaaaggaagcattgaataaccaaaaaatatccaaatatgtaggatcgggcttgtagctcagtggttaaggtgtttacccaggactcgggtgacactgggttcagtgtgtgcttgcataaattgggtatggtgcccttgattgtaagctcttgggagctggaggtaggaggtcagcaattcaagatcctcttcagcctgggctaccaaggtggagtgggtggagggaggctcttcatactcccaatctaatacctccttgtttagagtctttgtattatggaaatttcaaacagttgctagaggagacagtgttctaaccccacctcttccgcaattttaattcacaagtccatttgcctctctcggtattttgaagtaagttgcagattgccccttccatcactagctaaatatacacctctaaaattagagtcagtttttcctactgaagaccacaatgccacggatcagacttttaaacgttataaaaattgcttaagatcaaccattaagagccagagcccccaaatcgcttatcgtctcccttttagagttagctttctgtgtcaactccagaattgcttctgaagtaaatttctcagtttccactgtaattcgagcagcaggtggcctcacgggctcccgtgagtgggcggggcctgagcttcggttaggcgtcactgcctcccaccacggttgccttggcgatgaaggctgcttcctctaaagaaaacgtgtcagggtcgtccacaggattgacctcctgggcgttgaccacccctggggtgtcgccagtaggcagcacttctgactctgaggtatgtgtccctttccgggaagtccagtaccgggtccttggctaacaccaaggtcactcaaggtcaaggtcagagctgcctgggactcaagcggtaaaggcttgcaagctgatccttggggcagaggtctccaggacccctgaagctcacacagaccctgtgagcttactctggaaagttccaggctcacgcagcctcacagatatgcaaatctttaactggaaaaacaaaaagtaatctctgatcttaaaggggacccgtccctttttgcaagtgccattgattgactgggaagatcaacaactgttcaaagggtgttaaagattgctgctttctgagtgagtcatggttagtttctgttgtcacctgtccctgtcccaggagacaagaccaaacaccctgagctgagagtctgttctctgcccctggcctcatggctcatagtgaatttgtccctggtactccagggacctcttgggtaacacaaggtcatctaccaccccctcctagcaccagctatcaatgtgtgtggagcattaactcatcgtgaccctagacttaatgcttaaagggttattactattgcattttcacttatttgtgggtgggtggatgaaagtcccagtcccagtgctcagtgtggaagtcagaggaccacttgatggttgtccatatgcgtcctagtgatgaaggtcaggtgttcagttttggcagaaggtgctgcactccttgctaagaatttaaccgcaagtgcatcagctaagccatcttttttttttttttactgtttaaatctcctcactgagtctatcaagtacagtttccatgaggttattttttcccttcctttttttttttaaagactctgaggagtgaataatgaagtgttaattaacacagctttgttcagcttccatattagtccaaacaacaacagtctttgtgaagaagataagtatttcgctgcagactcagcagtcaggaagcacaaagccagtaatttcatgccttcctcttcaacaagggagcaagcaagccagtcccactccaccccctccaagtcccccagtactgcaggcagaccgctaagcctgcagggtctcccatgagcctttctaaataaaattagcatacattaaatgcacattttaacatgataaactggatcctaagctcattcctcccttgtgatcgctaatgtaagttaacataatttttaaaccagcatagaaaactttccaattaaattctgtgtcgtttaaacatatacaaaatcttctatgactgtatgtttccgtgtgcttgtacactaactcaccagtgaatgttatgccctttctaagaacatttagtgatttgaggcttaatgaatcagtgagagagagagagaggcggggggaggaaaggagggagggagggagggaggaagatagtttaataaaaagactgagctaaaatccataacatgtacacatacataaatatatatttcaatttttattagctcaatctttttatgggtaagaaactgaagaaatccagttgttccatgggcttacttagcagtatcccttaaccaataatgacagttaatattcggcggtatgttctccatttcccagacctataaaactgaggccttctagaacacagcaagatggtccaccattgggactgcccaattgggctcttggaactttgtggttggcaggaaaaaatggcaaaagacccttgtagggcagcgccagtgctgctgaggagaaaggcccccttaatagtgatccactttggggtttcttttctggtaaattccgtatctaacttgactcagccagaaggccatctagtcatctgaggcatgcaagaatgagctatttcttttctggccaacgctatcagaagtaaagcacaggcttcaatcactgcggttccccatgtattggtgatgggcaacatcgagaataaaaatggttgtcctcttcacatagtaggttctcaagcaattgtgttagcacatcgatatcacaggcagcctgccatatgccagacaaggcggtcaccagaaactgcagtctacactgagataccctgagcacagggcagggggtacagaagcaggaaaagagatttttgtgggggacatttcatgagctctgcttgctagtatctgaactgtgaagtccagtttcttcagtaatattggacaaaaatacctccttttgaaatgtgagattaaactttcagcctttatttccatgaatatacaaggtgaaaaggaaaaaaaaagtaacaaaaattgaaaataaaggatagctactatactgtgtaaaaatagcttataaataaatatccggttcagatcccacagcctcctggccagttagttcataaatagtgtcctcaaaagtgctaattattgaaagcaatatggcatagctcacatgagagagctacagggttgctgaatatgagtcatagcatgtcctcaacagaggatgtgaacctggcccctctggtaaatcaccagaatgcagccattatcttacagggaaagatgctcatggtggtctgagagatcatcagtatgtctggtgggattctacaggcagatctaactacatgctgatggtcctctagacgttaggggtagtcctccagaacaccccgttgggctcaacttgagtagcaaacgttcaagtttacacactctcaatatcatcctagaaacttctatgattgaagtacgatacttgaatgtggataaaccattgtatgatataggtcaacctgggcagactgtgcaatggtaaaaataaataaaataagataaaataaaataaaataaaataaaataaaataaaataaataactagacctcaaatgtctgtattagcatgtggatgcctggctagtttctctctgtgcttcgagctatagacccctttaatccctcctgttctccctctgccccttctctcaggtgagcccagctcattttcaatcttctgatattaaaagatttaggctggggctgaagagatggctcagtggttaagagcactgactgctcttccgaaggtcctgagttcaattcccggcaaccacatggtggctcacaaccatctgtaatgagatctggcaccctcttctggtgtgtctaaagacagctacagtattcttacatataataaataaataaatcttaaaaaaaaaagatttaggctataagagcaagtctttaagaagtccaaatccttattcattggcagaggaggctcttgcatgtgccactgggcacatgcggaggtcagaggtcaacattggggagtcagtaccttccttccactgtggacaccaaggatcaaactttcgttatcaggcttgacgtacaagcaactgacccactgagccattcacaggcccaatatatatattcaataatatacaatattattacattacataactatgatatattaaatataattatatatgtttatatatatatatgtatatgtgtgtgtatatatatatatatttgaaatgaggattcttcctgcttagtatagcagcctgtctcctctccatcacacatagaacaggtaggggtactatgagtggactagccattaaagcagaatacagtttttctatttatatgcaaattacacaattcagattgctattcttttctgctgactagtgtgtgtgtgtgtgtttacacatacatagatggaagccaagacgtccacataggatgtcttcctcaagtcacttaccccttaatttgtgagacagggcctcttcttactaggatgtgaacctcaccaattccccaagaccagtggttctcaaactgtcctaaagttgtgactctttaagacagttcctcgtgttgtagtaacctccaactgtagagttatattcatggctacttccataactgtaattttgctactgttatgaatcataatgtaaacatcagagcattgggacagaggtcaggacccacaagttgagaactgctgcttttgactctctggctgtagcgttccaggaatctgcctgtgtcagatgctgcagtactgggattttaatgtccaccacccagctttctgagtgagtcccggggatctgaactcaggccctggtgatttcttggcaggtattgtgcccactgaaccatctccccagactgagcattattgtttatacattgagcttctgcattctagtttgggaaggcccctcccaccatctgaactccttccaagtgtctgtctcccctcctaagaatttaaaagttatcttgtaaagttctggggaaatcccactggaattcagaactgtctttgctttacatttgtgatgtgagaggaatgtattccttgagtctgaaggagtttctgctacatatcttttaatcaattcttatccctcaagttctgaccgagttttagaattttgttacaattcttatgcttttattatactcagaacaaggcacaattcaataactttggacatttccatttctaattagtttctcaaatggagaaaagaagccggctttgtgtatttatgttatgtataaccgtcttgccccgtttcctagctgagcgttagtacaatgtcagccttcttaaggacactatgatgtcatcttcaaataaaggcccttttgttcctttgtgtctaatacttaagccgaatatttcattttcttatctccttaccataatggaaaagaatgactctaatgttgaattacagtaaagttcctcgtctggatcccatttccagctcttggttcgacagcactgactactgtccccgtgtcccctatgatggtggctgttagttttggcaaatagtctctggcctggctttgtcttctttttccattaaattttaccacgtgctttgcttctgggtttagaaggtaccaggtcagtatttatccacagaatccatgttgaatttagcataaactttcgttcgctgtcacaggttctgtctgggggtgggggggtggtccatcagtgtcttttaatcacagtgggatccacactttgccagatggatttttagctcagatgagagtccaagttcattactgatttgggattctctattctcttggttgttctttaggatcgtctatgtagatgggcagcttttaaaaactgaactcttaaaagcctaacattattaacctaggttttgattaacctaggctttgactcagggtaataccagatgggcatgatgactttacaaaaggtagaatccagtttgggtcctgtttggtcaaataaattttctcctctatcctcattaaatatgtttttccatttcctgtatttgttcactttactccaattgcagccccccttctcccaacccctcaccatgtcacagagcccatcccttactcccttcacttctgagaaggggaggtcccccaaccccgggtaccaaccgcctcccaccccctccctgtacctcaattcactacagaactaggctcatcttctcccaccgaggccagacaaggcagcccagttagggaaacaagatccacaggcaggcaagcaggctcagggtcagccccccaactccagttgttggggaactcacataaaaaccaagatacacatctgctacctatgtgcatggggcctagatccagcccgtgtatgttcattggttggtggttcagtctctgggagccctcaagtgttcctactaagttttgacaatttacattttccgaggaaatctcccacatccttatatttttataatgttttgccacctgctgtggcagacattcactttctttattatttaatcatacttaccagagagttgcctttttacctatatttttaaatagctattttatttgtctttatttcctttagttagttatgttcttttacacataactggctccctggccctgtgggaaagtcacaaagaggagggtgaggctcgaccaaactcagcatctaaggagataccagccagtaccttagtgacgcagacagctgatgcttccatggaccacactgataaaatccaagtgggtacaggagatgctggaatggatcaaatgttaaaataaagacagcaacaatattcctgacttttcttttgcttaagactccctcatggtttaacacatcactgctcctcagttcaacatctggcatttgtaaacaaggtcatgttccttctgactgggaaagccctctctcctcatgcgacagacctgttgtctttcctcgaatgaggctctttagagactctcctatatgaggcaccatcaacgatgggtgtgtagttacaaatgtcgggtgtttaggtgacactcaggagaaaccaggcgcaaggttatctggtaactaattggagacctaacatgttgactttggaagggatgctaagatctagcaggtggaagatgtgagttaacagtgcagtgtagcctcagagcttccaagctggagaaacagtggttgcagagagccagagacgggtgggcaagtttagcatgtttatgaatcgctgttgtgtcttccggctgtatagatcagaatgtatacactgaaagaccaaaggctttcagtcacttgaaatacttgaaatactctttcaagagcaaggcaacatagaaaatctatataatatatattatatgtatagatgtgtgtgtgtataaatgtatatataatagaatacatgcatatatgcgtacatatatgtgcatatatttatatacatatatattcatatatacaaatatatgtatgaaaggaagaggggaggaggcctcatttaaagtagtaccaggaatataagcatttgtttaaatgctgctattactaacactaaaactaataagagaggaaaactctgctaaaagatgattgtcttaatcccacagtttttagtaagaacagtggctgtggtatcaggtatcattgctccagctctgactttcaaaggttgatatgactagattcatttcagagctatatgactttatatctatataaaaccttatatagctctctctatgcgacccaaattttttctaccctgaattttcctccccaagtaactggatctgtatgtcagtgtctttcattttctgcatacttctctctcaccctgtctcattgtggccatcccgtgagtactcaaacatagaacatgatttttaaaatttctgtgcacggggtcctggttatgctggccctgagggagagttcaccgaccccctttctgtgaagttcagccatgctcctgtccttgtctttgctgaatgccccacttagtacagctcatgtctcatgttcattttgctttgaaatattccttctagctgtttgagaattgaatccacatgcacaatgtgttctgatgaacccgacctggacccctgtccctaccatgtgtggctcaggttttgttcatctgtggtcccttttcctgacttgccattgaactccttggagtgagcaagcctctgctcacttcccctctctcaagcctgaagttcaaccaggaatatgtagaagttagatacctaacatgtagcaatagacagtcggtgtttgctgaattgtgaagcagccctcagttctgcatatacctaaggataggctgtcttgccctctaaccatgtgacttttcagaggtgagccactatcacataacaacagaaaagaaaaataacaaaggtttttgtatcactgaggtcagtactcgcaaaacatatgattcagataactcgttcttctttgacttgctttaatagaaaaatcttgaattccaggagaatgaaaggattctgtctccagatatactctcctctgaccagatcattgacctgttgggagaagagaacgaaaatggaattcaagagtaagtaactccagagtctcagttaagtagagaccagttctaggcctttgttgctaagtgaccacagtgcattagttagacatattaagctttaatttaaactgtgtgctattacagtatgtagtaaagtatgtcaagtcttgggcacacacatgtgcgcgcacgcacacacacacacacacacacacacacaccataaacacacacaaatccaagagtaattgactcagtctagctcaggagcctttgctggtgattaacatgcattggaaagctgcctgttaatactgaccaagagccacctgtatccactctgtaccctctcctcttgcatgcacgaaattatcgatatgtttaataatctaaagggcatccctttctaacagtaagtacataacagagtaaatatgtcactagcattaataattaagtaggttattgtctaagtttgggttactgttgctgtgatcaaacttcatgaccaagcaacttgggagcttacacttcagcatcactgttcatcgttcaaggaagtcaggacagaaacttaatcaggtcacaaacctggaggtgagagctgactcagcagccttggagaggtgctgcttactggcttgctcctcgtggcttgctcagcctgctttcttatagaacctaggaccaccagcctatgggtgccaccacccacactgggcttggtcctcctccattaatcatcaattaagaatgtttccttttggcttgactgcagcctgatcttatggaggcattttctcaaatgaggctccctcctctcagatggcttcagcttgtgtgaagttgacataaaactagccagcacagttatgattttgaaaattctgcacactagcagtttaccaatgatatttattaaaaaatgatgctatactctagattcttacagcatgtattgttttatgtataggtaagatggaatttgtcacagtaattctaatgctgcactctcgggtatacagtactagggcattatcattagccagatatgtcaatcaacatgatttccttaaagatgtctgttagcaactcgaaaagtgtctcagtggcagagagcatgtaatggtcttgtagaggagccgtgtttcatttcctatacccacattgggaagtttgcaactaactgcctagaattctagctccagagatcacaaaactctttctggccccatgtgggcacctgactcattttcacataaccctccagacaaacagataaacacacaaatagtttaaagaagaagttttagtcatcctccattttaaaaaaatcatcccactttgaagtggaaacacccttggctatggagagtgaccctgggttggtgtgatgggagagcctgtgcccgaatcctgcacaatattcacaagccaatatgaagggcacaagcaaggtgtcacagaccataatgaacacatagaaaaggactctatcagtgatgaccacagtcagactttacaaattctgtgaccctgaagtgatttcctcctgagaaggagctgtgacatccatccccaagagcaggggaatctgagaagagaaagctcatcaaaagaagcaagcaacactgacagatctgacccaagatgcacttcacctccaacacttgcagactcttctgggaagggatagcagtgactggaccccactgtctgccgtctgcagtttcccgagtgttggtcagaaaacgaaaattctcaccaggtttaagtgatttcttgtaacacctttaccatttttccaaaataaatatttactgggaattctgattcttaggttaggccttgttaaacacacacacaaacacacacacaccacacaccacacaccacacaccactggtcacagatggatcttgatgcctgagtttgaaccctgacctacacaaaggaaggaaaaaagtcaacttcagtaagttgttctctgctccacacttgtgcacacacacacacacacacacacacacacacacacacacaacccatatacacacagctaacaaataaatacaaaacattttttaaaattgatttcaagtaattactcacagtattactaacacacattgcaattttatgtgcaatgtttatcccacttgaaggccacgatatgaaagtggtctttgtcatacacagcaatactcaatactaagtgagaataaatcagggcaagtgacagatatttaatccagcttccaatttactagtaatgaatagtaagtaaattgtcaacattaaaaataccaaacatctattatttaatagtaactgatattaaataaaatgttagatttttttttagaatcctgtggttttaccacattgtagcttatgcagtgattacagatcctacattatagaacacatttttttttcagttattgactgtgctttgttgttacatatccaaattcagaaaacacttttgaacatcaggggtgtatacgtggaatgaagcacaggacacagccggtgtcacagctgtcagtgaaggacgggacagctcgttcagggacagaagcataggctcgccaccagttcacaggcagcctggatttcaagaactccagaacactccagaacagccccggctccctggccagatacccaaagacacaaaacacaacaaaccacaacataaaacttagccatacaggaatgcgtgcaacggctgtgtcaaaagcaggtttgacattgccagtgatctgagtgtagagagcgcgcaactcgatgtcaaattttaggattgtgctatcttgggagccatttttttttaattttctcatgtttttaaatataattcctgtaacaataatctacatgtgcttgcaatcattttcaatttaaaacagcattattgtaagtgatagttatatatttttcaaaaagacagtagtataatttaattatcctctcccgggtgaccaaaatagtccaagattatgcagtttgaaaagctataaacctacttaaataaattacaacaaatcaccatatttccctacatttcacaattatgagttttgttctctataccaacaggcaacccaagagacatgagggattattcaaaatacattttgaaatagacttcacatggctggtgttcttctcatgacttctaaatgctatcaatatcttatttaactcagcaatacttacaagtcaactccaaagtttcatttaaaaagaaaacacacacacacacacacaatcagagatgttgccaaactagctcagcagttaagtgcaccagctgctcttacagaggtcccgagtttgattcccagcacacatggtgtaacaaccatctgtaagtctggttccagggaatggggatcaaatgtcatcctctgtccttcttgggtaccacacatacaagtagcaccccgacaaacatgcaagccaaacaccaacacccatcaaattaaaaagattaaaaaaaattttttttaatgatagaggctagttataaagaggctttataaacacagaagtaacactgaaccttggttttgtttgactgtttttggaaactgagtcttactccatcactcaggctgacctctcgctccagggaacacccctgcctccgcttctcaagtgctgcactttgggttatgtgccaccacaccaggtctaccaagaagccgtcgaggttaccacagccagactgctctgagctgcttaactggtcggcagagcttgcttccatggtgatgcactccagaagagaaaggtgttccaagttccatagcatgaaggaatgacaaagtagttttgctgacactctcaacacggcaaagcagatggttgcatcgcccctggccacatcacatcacggtccctctgagctccttctccttcctgagcaccagcccacactggctgtggctctctctccctcctgtatctctaactctatcctctcttatgaccaatctagccagtggaacgcataggacctgcgttccagctgtggctgtagcttgctctgaatgactgtatctcctcctttggagtgaaacgacttgtggaagaataaaccagtcaacactaagccccgaggatcaagcaggggcaggaatccactggcactaggaaatgggaggagggagggacaggtgagagaggggaggagggagggagagtatgggccaaagctggggtcgaaggaggtgagagagtagtcacccaaataaacttagaaatgtcatcgttgagttcattcaaacacacgcactgaaaaaatagaaccagaaagcaaggaccaagtccaggtattcaggtcaaatattaacttaggaatacacagaatgcagacagcagatgaagagaacattgttgggggggggacagaagtgagaagaaacattaaccaaaagtcatgactaaagagtgaatggatgccacaaggcaggagattaaagagctagtaagacatgcacataaggagccgttggagctaaaagaagatgctaagcctagagaaggaagctaacgtggaatctgccttgctggaaacgtcagtggcaagatcaatgtagggaaactcacagcaatgaatgcgtcttcatgcgagaggagggtattgggttacacacgcaacacaacgaacaagaagagaattaggctatgatttcctgtttcagcaggaggaaacttgagacatctctttatgtccaggataaaataacccaggaaggaccgtgaacaggcaggccttgtacagttccttgtcagggatggacaacagctatctggaggaacagacatgtcatcagaacctgttgtggaaagaagaggatttcagaaccgaattctagcaggacgtttttatataaagaactcaaaaactagggtgcgtcctgtggtttaattgaagaatcgacctattgcctcaggcaagcttaatcaattcattatgcatctaacataacaaaatcaggcaagattaatcaattcattgatgcatctcacataacaataataagaaaagtgctgaagagaaattgtcatctaaaataaaattgaataaacctctgtcagtaagcacaagactcatttgaaattaaaataaaggcaaacaggataattataaactagaacaactattctagaacattttggtaaaaataagtacgtgcatgagggggagataacccaatttcttcctttcacaaaaataaaactgaatttcagaacgctgtgtaaacactgtatccaaaatgtgaagaagggtcaatagtctttgttacactcacacacacacacacacacacacacacacacacacacacacacacgcacttgtgtgcatgcacatacacaaaacgttcttaggatatcatttgtaaaagcaacgaggagggcagaggagatgctcagagtccccagagctcaccctgcactgggagaaggagcccagccaccatgtttaagctgtgcagtcatggtgaccacctgtaatcccagcacttggaggcagacagcagatccctagacagttgtcctctggcccccacgtgcgtgcatatacttatacacgttaaacatttttagatggatgcatttacataaagactgcatatatgtgcatacataaataggcataaacataggcctatattatatataatgtccccatcaaactcagtttttaagtcaagttggcttctaagtttcctgatgtgggagattgtagataaggactacaagatgattgtcagtaacaatcaaagctgctcactaattgctttctgattgctgtacagtgtaagaaaggctacctcgccctgtgaattactaaaataatcagatacctgcagcaaagccccctccctgccactgcctcagaccagtttcgtaggctggacggcatcatgtagaatggtgggaagggaaggggaaatgaagtcgttgtttaaaatcaccagacttcatggagggcttgtggtttcccagccagggctgcacctgtgtgtaatgcgtgtaatgggtgatcataaaaacccttctatgtgattgctcagggttcagtgtgctgaggctgttcttccctccctgctccttcaaggcttccttacttcctctggtgtctctctttcttccattgccccacataactcagagtatcagcacttgagaagggattgatttgttacacacgtttaaaaaacacttctgaacttgtttcaattatcatgctttaaaaatggtgaaggacaaaggcttccccttttaaaaatggtagggtgcgtttgccccaggtaccatcactcagcttgacccaagaaaccacatgcaagcaacaaggaaaaccaattaggctttgtatcatagccctagccttgagctttggagatgatgccccatggttatcacagattgtctggacatgatggaaatggtctgagggagatgcacacagctacaggtcttagaaggaaggaaggatacagagaatttcctggagggagaaaaaaccctagatgccatgccaggaagccccactagttgtgtgcagaactagagtacacatatctgtttatactgcagtaagatgagccattttttttcttcttcctcagtaactaaaacagcaataagtgttcaaagaattgacagaaaataactccacacaggaaatgcctgtgagtttgttatcagaacacaagaagtaccaagtagtttgaatcacgacacaggaagcagctaatagtttgtaccatagccaggtctctacattcttttcatttcattacaagcagatgtccacagacatcaactatgttcactcaaagatagctaagccatgaggaatacccatgcagagacagcgcatccacaacatacagacagagaagggatagcacgagggtcccaccagacagacatgatcaggaacacagaaaatacaggcaaatgtgccatgagtttttcaacctgcaacaagaatataaaatagacttacaatagctggaggaagagatcatgaagaagaaaaaattgcaaatatcaaaaagaaaaatgtagaaaaagaaaggtctaacagcagctcagagaagaaggaataagaaatagactcgaagaaaggaaatacgttagaggatgaatctgttgcctgtctgtggatcctgctcattcccataactgggtgactttgcctggccactgtgggagaggatgcccctgggcctagtcctgcagtgacttcatgttcaggaggttgggtagtgtgtgtggggnnnnnnnnnnnnnnnnnnnnagggaggaacagggaggcacctgcatgagggtgggggactggaagtagaggaggagatgatattggaatgtaaagtaaataaattattaaaataaaaaaattaatttagagaatatacacacagatatacaacttgttgtttttttgttttttgtttttttacagaaagaaaaggacagactacttaacagtctgctttcaaaaatgggacaaacttagtcagtagattgatttatagagagatcctggctgaagatgtggctgggttggtagggaaagtatctggggggtgtgggctcctctgagccccacctggcagggccgtctctaatcccagctatagcaactggactgaggctggggcaccaggagcgcaaggtctgaggcatgccagcctgcatggaatattgaatttaaaagtataagaagtgtagacagggagaaaggaagagagagagggggaggagggaggagaagaggaagggggaggggagggggaaagagctccaccccactctttcccttgcctcctttctctcttctctccctgtcatctctgaggctgtgatatgactgaatactttaagaggtgtagcgttcgagaacttatattcaaatacttgctttcaaaacttccggagactgttcactattcaatctcactttaacatctgcatttttcttctttgtcattacagaaaactgggagtgtttctgaattttaaaaatctccagacttgcctgcgtgacgccatcctcttggactactatgtgtctggcttctgttgggccaaggagatgaacttttctattgagcagtattccaagtttatgaccttgctggacatgctacttcataatcttcaaagtgagtgtgatccctcgctgtcgttttaaggggagggaatgcagtatatgtaaattaatatttaaaagccaagactcttgcttcattgtgactcctttaataaggactgcggccttgtttcttagatacaaccggggcagctcatttctcattgaaaggtaaatcctcaaagaattcttagtagactaaggttctctttgttgattcgccaaagatattctagttagccttccccacaccacagatatctgaggatacgctgatattttggccaagttctgtatatccggaactattttgaaatccaaataattcaatctgtctttaaagtggaatactatgtagttagaaaaaggaaaaataaggactatttctgtgtgctgtgggcagattactggagtaaaagatcaggaagcatgatgcacttttgtttataaaaggataaaaatctgaaaggatttttatttatatgcattcagaaaggcagaaagaatacagaaaaaaatgagaattgtctgtgaagccaagcatggaggctagtacttgggagcagagagtcgggcggatgtgaaagtctaagacaaacctaacatgcgacaagaatgggttttagaaataaaaataaaaataaaaacatcttctggggaggatgtggaaaccacggtgtgagcagcagggctggaggaagcctttttcaggccagctctgcatataaagcaaaccttgaccaagtcacccatatgaaaattaaagcatcaaaggatgttcgatgtggctgtcccaagctttgcaacttctgaagagagcagaagaacgtgaacattttcccccaagagcttggcaatcctaatgtgagcgagtatttctgttttacaccgtcccaccttcccctcagcctccagatggcctctaagtaggcttctcatggtcggtatcagtttgaacctggacttctgacccacttagctggctttgtccagctaaggcatgagagagtaaaaatacaaatgtcaaatgaggggaaagcaaacaaattcattttcccccctctggtaagaaaacatcttctcaaacaaaccctttgatatcattagaatgtgaacaagacgtacagcttcagttggtttcaaggaggtgaaatgttttacagtaaaaccagggcatcatggggtcctgagtgcaaaatcatcaggccccactccagcacggctccagccagggagcatggccctgcttcgtggttggagggtggctccgcctacataagatccactttggaacagccatggttctgacttgatccttgtcctaagcctgtgttacatgagtataagccagtctgcagagagcccacctcaaatctaaacggatcatctcaaagatataaaggccagtactaagactgatcttaaggccatgctttgtgggttatactcactgaaggcagaaaatatttctggggaaaaaagaagatcacatatgttcaccaggctcagacttcatctttttcagtatttcttgaacaatagatgaaaacaaataatttatatgttattattcagagagggacgagtcagggtcagagtcaactcctgaaggtgacatgaggtcatcttcagcaaacaagagtctgtccctttgatgccacaacagacatagcagacataagtcagaaacctagaacgagcagcaaagataataaactagaacctgacccgaagcagaatgctgaacaaaggagcatgtgatggatgggaaatgctgcatgccaggaagaacgtatatagagtggaccagaaatgggtacacgaaaggaaagggctagacatggatgcacgcagcagagggcacataggtaaagggccagacatgggtatgaatggcatgtgtgaaacaagcttgaagctggttctcagtagaaataccacatacccagtggatggaaacatggaaccccttggaaaaagcacattcagagaaggacacaaatgggtacacgatgaagtggtaccggaagcatcaacttgaaagcgctcccgtgtagaccaaggctttccagtgcacttcctgtgtttctgccacagcagcacggtcatcttcatcttggatgcaggagtttcaagataaggcttaaagctagcaagtgtccctttacctgatcccaccccaagttgttttactgttagaaatctagagtcttcttatttacctaggtctcccagaatgcatttggtttagtccctcttggtctggtcactcccccgtgggacttcagtcagatccatgaaaggataacacctgtaactttcaaagcaatcaccttgagaaaggcaggaggcaccactgtctaaagggtcagtcatcggctaacccaagccacagccttgccaccagatgtgttccgtgtttgataactacagttccatccagaattcaaatcaataatctaagtcccctcttcctcagcatcctgagttagtgagttcgattttctacttatgatgtcttgctcccatcctgtcgcaaccatatccatccttccttcctagatctcttcccactttggggtttttagggtttattgtgagtagagaaatgtacagttggactgtgttttacccaagatagtaaacaaaggcccctgcctggtcccataggtctgcatggatcatgtgctaattatgagctgtaggagggtgtgactgcagaaggattacccctagtcatttctggggtcatcactgtgttttcagggcccacctaaaatatttatttcagcaccagatatatttattgatcagtggggttcaattactttacattgctttctaattgttatagatagaagaaaagttaaactaaataaattgtaagctagtgtttgcctgtgctgtctttctaaaaatcataccagtgatttttgatatctggcacatgttgaatgtgtgttccagagaaagtgggtgggagagggtaagtgcctgactctgcaactctagacgtggctgaagcaactctcggtatatattctcacaattcctctctatctccaactttgtcctccagcactccattctagtgcaggacagaggctgtttctcgatggtttcctaagagatcttcaactctgggctgcagctttcacaaataatctcctcaggcacctcagcctggcacctcagctgagagacacctctcctgacactcggctggcacacgttttcccaagacctttcaaccctgcctctggggtccaggaattgcctcacaaaccacacaaacactgatctcagtcagtcagagatagtttactgagcacacaccctaggactggtggaccagttccagatttgggaactgaaccatgaccccgagttaaaatcttacagggtttttaagcccaaaatccacaaacatctgtgccaagttattttaccaattaggatgtagggataggggatttccttaggagcatgtctttgctgtacatttatcttgtatccgttggttggggtggtccactgtggcaggggacttgccttgtctaatattcatgtcttcatttgtctgccaggatgggacttgtgtaacatttatgtcttaacttgccaaccaggatgtcagttacccacatgcatgtctctttctgccaagtagcttgtcatttcccagggaggtttggggaacttaaactctacttgaccactatttaaaatagaatttttattttaaaaagcttcttatattggttcagatcgctcttatgttggggtcgaacctaggggcagcttatactataaaagcttatccagaggtgtaggaagtgctgttggatggttggtcaggtccaggcttattggagtagctatataaaacagttctgtgacttctatcagggctggttttcagatccacagaacataacagaatatgtaatcaatcttggcatttgaaagttttctaataacagcagaaacatatgagaaagtttccttataatggcaggctggccaggtaacaaatacttaggccctaacactttacctaggccttagcattccatctaggcctaatatttaacctaggccttaacagtgtgtatgcctacctacctgagacagaaaagactgtccggatgctccagttcccagcatccagtctccaaggtgggaggtaaaagggcatacagattacagatgatattctacctgccacaagaaaagcaagcaagcgagggaaactcatagctctgagtgcctccaagaagaaacgggagagagcacatactagcagtttgacaacacatctaaaagctctagaaaaaatgaagcaaattcacccaagaggagtagacagcaggaaataatcaaactcaggggtgaaatcaaccaagtggaaacaagaagaactattcaaagaattaaccaaacgaggagttggttctttgagaaaatcaacaagatagataaacccttagctagactcactagagggcacagggacaaaatcctaattaacaaaatcagaactgaaaagggagacataacaacagatcctgaagaaatccaaaacaccatcagatccttctacaaaagactatactcaacaaaactggaaaccctggacaaaatggacaaatttctggacagataccaggtaccaaagttgaatcaggatcaagttgaccatctaaacagtcccatatcccctaaagaaatagaagcagtcattaatagtctcccagccaaaaaaagcccaggacgagacaggtttagtgcagagttctatcagaccttcaaagaagatctaattccagttctgcacaaactatttcacaaaatagaagtagaaggtactctacccaactcattttatgaagccactattactctgatacctaaaccacagaaagatccaacaaagaaagagaacttcagaccaatttctcttatgaatatcgatgcaaaaatcctcaataaaattctcgctaaccgaatccaagaacacattaaagcaatcatccatcctgaccaagtaggttttattccagggatgcagggatggtttaatatacgaaaatccatcaatgtaatccattatataaacaaactcaaagacaaaaaccacatgatcatctcgttagatgcagaaaaagcatttgacaagatccaacacccattcatgataaaagttttggaaagatcaggaattcaaggcccatacctaaacataataaaagcaatctacagcaaaccagtagccaacatcaaagtaaatggagagaagctggaagcaatcccactaaaatcagggactagacaaggctgcccactttctccctaccttttcaacatagtacttgaagtattagccagagcaattcgacaacaaaaggagatcaaggggatacaaattggaaaagaggaactcaaaatatcactttttgcagatgatatgatagtatatataagtgaccctaaaaattccaccagagaactcctaaacctgataaacagcttcggtgaagtagctggatataaaattaactcaaaacaagtcaatggcctttctctacacaaagaataaacaggctgagaaagaaattagggaaacaacacccttttcaatagtcacaaataatataaaatatctcggcgtgactctaactaaggaagtgaaagatctgtatgataaaaacttcaagtctctgaagaaagaaattaaagaagatctcagaagatggaaagatctcccatgctcatggattggcaggatcaacattgtaaaaatggctatcttgccaaaagcaatctacagattcaatgcaatccccatcaaaattccaactcaattcttcaacgaattagaaggagcaatttgcaaattcatctggaataacaaaaaacctaggatagcaaaaactcttctcaaggataaaagaacctctggtggaatcaccatgcctgacctaaagctttactacagagcaattgtgataaaaactgcatggtactggtatagagacagacaagtagaccaatggaatagaattgaagacccagaaatgaacccacacacctatggtcacttgatcttcgacaagggagctaaaaccatccagtggaagaaagacagcattttcaacaattggtgctggcacaactggttgttatcgtgtagaagaatgcgaattgatccatacttatctccttgtactaaggtcaaatctaagtggatcaaggaacttcacataaaaccagagacattgaaacttatagaggagaaaatggggaaaagccttgaagatatgggcacaggggaaaaattcctgaacagaacagcaatggcttgtgctgtaagatcgagaattgacaaatgggacctaatgaaactccaaagtttctgcaaggcaaaagacaccgtcaataagaaaaaaagaccaccaacagattgggaaaggatctttacctatcctaaatcagataggggactaatatccaacatatataaagaactcaagaaggtggacttcagaaaatcaaataaccccattaaaaaatggggctcagaactgaacaaagaattctcacctgaggaataccgaatggcagagaagctcctggaaaaatgttcaacatccttaatcatcagggaaatgcaaatcaaaacaaccctgagattccacctcacaccagtcacaatggctaagatcaaaaattcaggtgacagcagatgctggcgtggatgtggagaaagaggaacactcctccattgttggtgggattgcaggcttgtacaaccactctggaaatcagtctggcggttcctcagaaaattggacatagtactaccggaggatcctgcaatacctctcctgggcatatatccagaagatgccccaactggtaagaaggacacatgctccactatgttcatagcagccttatttataatagccagaagctggaaagaacccagatgcccctcaacagaggaatggatacagaaaatgtggtaaatctacacaatggagtactactcagctattaaaaagaatgaatttatgaaattcctagccaaatggatggacctggagggcatcatcctgagtgaggtaacacattcacaaaggaactcacacaatatgtactcactgattagtggatattagcccaaaacctaggatacccaagatataagatacaatttgctaaacacatgaaactcaagaaaaatgaagactgaagtgtgggcactatgcccctccttagaagtgggaacaaaacacccatggaaggagttacagagacaaagtttggagctgagaccatgtagagactgccatatccagggatccaccccataatcagcttccaaacgctgacaccattgcatacactagcaagattttatcgaaaggacccagatgtagctgtctcttgtgagactatgccggggcctagcaaacacagaagtggatgctcacagtcagctaatggatgcatcacagggctcccaatggaggagctagagaaagtacccaaggagctaaagggatctgcaaccctataggtggaacaacattatgaactaaccagtaccccggagctcttgactctagctgcatatgtatcaaaagatggcctagtcggccatcagtggaaagagaggcccattggacttgcaaactttatatgccccagtacaggggaacgccagggccaaaaagggggagtgggtgggtaggggagtgggggtgggtgggtatgggggacttttggtatagcattggaaatgtaaatgagctaaatacctaataaaaatggggaaaaaaagaaaagaaaagcaagcaagcaaacacacacacgcgcgcgcgcgcacacacacacacacacacacacacacacacacacacactaatcaaaacaaattgtacatattgatttttttcacctaaaacaccatagagttaagtctgaggttgctaatatttgtgtttgttttcagctggacaagtgtcacaggaaagagcctgtgcagtcctgttgttgtttggctgttgtgtatttgtagctttctgagaatcttctagaaccaccaagctcattgggggtcatggtgaggaagttgtaccatttccctccaggcctgacagtctcaacaaggcccatttgacaaacaggttacagggctttgcggtctgtaatggcagcaatattttacacagaaatttctcttttcaatataaacacctaaagggtttgccagatgattcaacaggtaaaggcccctgctaccaaggctgataacccaagtttagtcctgggaaacccatgggtggaaggagagaaacaattcaatgaaattttactttacattgtacacaatgtacacacacacattatatacatatatatatatacatatatcataaaataaatacaattcaaaaataagtatataaagtttgtaaacatccctatgctttattcctatcttcaggccaagttttcatgataacactcagttctagccaagaaaaagtgggttcttctcactgaccttttttctctcctgagctcagcactgacttcaccgtagctgaacccatgatctgggcctcctagccacctatggcagctggccttcctctaagttttctatatctttctctgtcccttcaaaatctgttttaagatgttccttcccatttagatgtgttatttagatagatattcatggttttcctttttaatatgaaaatgaagtgtccagacaaccatgtgtatatacagtcacagtgacaacaagaccaaccactactaactcactccaagagcaatgattaatttgttgtaaagaaacaagaggcttaccttgttctctccacaaatgccagacaaggtaaactggggcacattttagaactactaaatcatgaactactagaccatgggttaagccactgtggaagtcagggtgaactcaggaagaagatcaataaggagaaccccctttttctgggctagaacttctagggtgttatctgaaatcttggcctaaagatttttgatggaaataaaacataggaatgttttcaaacttttgtactcatttttgtgtgggctactgtactcccacaagagctctctggataacggaaactctctcctcactctggtttcagcactgcacatgtccttagaggacagcattaagtggctcggggaagtgatggcagaaatcggaccaaaccactcgcagaagagtgaagatttccatgtcttcgaagtcaaggaagccaacgccatcatcgattacttaaaaatcaggtaggacttgttctcatcccatgtatgtaatgttctatgtcttctaaacaacatccataaaaaaaaaaacgtagattgttgtaatccagacgattctagaatttgtgcagtgaccactcaattcgcagataacacacaggctcaggagatggctcagcgagtaaaggctcttgccaccaagcctggtgactggagttccatccctgggaacttcagagtagagggagagaatcaaccaagcatctaagctgtcccttgacgaatatcaaaggtagagaagcatccacacacctacatgaacacaacgttgatgtctagaaaagaaagaacactcatttatgcatctagcaaatgacagtctggacctgagcagtctctctctctctctccctcccccttccctccctctctctctctctttctctctccctctctcttcctctctctccctctctccctctctctctnnnnnnnnnnnnnnnnnnnnnnnnnnnnnnnnnnnnnnnnnnnnnnnnnnnnnnnnnnnnnnnnnnnnnnnnnnnnnnnnnnnnnnnnnnnnnnnnnnnnnnnnnnnnnnnnnnnnnnnnnnnnnnnnnnnnnnnnnnnnnnnnnnnnnnnnnnnnnnnnnnnnnnnnnnnnnnnnnnnnnnnnnnnnnnnnncctctctccctctctctctctccctctctccctccctctctctctccctctccctctctctctctctctctctctctctctctctctctctctctgttcctaacgtcaattccaggatgacaccatggtctcatctggcctgtaatcacctgagtctgtacctaagagcattttattcacagaactgaatatagttataatggatgtatattttaggtggctggtttttatccaaggagccacatttacattttaaagagtaacattcatttccccttacgcattgattttccatgatttgtctttgcaacacaagagttatggcagaggcctgtaatctcaggtaggggagtttgagttattacaatatgagttcaataagcaagttagtgagacctcatctcaacagtatttgcaaagaggattaggggtgtagctccttcatagggtatttgcctctatcaagaatgaggctggatgctcaaaccccagtatgggaaaaaaataaagaagagattcatatatttcatccaatttgttaaatactctaagatattttgaagtaatggccagtttaactcattataaagtcatactttctacttagaaaatgatggtttatggcatggaagtatttttatatcaccactactgaagcaaaacatccatcccatttttttttgcctgtgtttgttgcatgtgtatttgcttacacaggagcacacgtgtacaagaatgcacatgtgtgcagatgtgtctgaagtcccttatcttccccaattgctcctctcttcatttactgagactgaatctctcccttggatccagagctctccaatttagtgtattcaactagccagcttgtcccgggaaaagcctgtctccacctcctgagcaatgggatatgtgtcagtccaccatgtccatccagcatttattacagctggggacctgtatgttggtcctcaggtatgagcagcaagtgctgagctaccctcaacctgaaatctgtcagtagagagcttatcacaaagcctgtgtgcgaggcatgcctcccttcaaagagacattttgtgacttcacaaataccagagcagcagtaggtgaaagtcgcctccaactaactacatctctgcagtctccttgcgctctctcttcaactgggtctctatttcccaacatcacctttagcatccttcaacaacccaatgtcctacacaggacaagattcgtgtggcaaagatctgagtatcatctggaaactataaatgttagtgtatttaatataataaagcttatatactgatttctggtggagcttaacagtggcatatagcacagtagtttatataagagagcatttaatacagtgcgattttattttatattttattttattaatacaaagcatgtctcctagtgtgctcatctcactgagagccatagaagcacacatccttcagagcaagacaagttcccccgtaggtcaagaggaagaaatagatgggagcctgctctcgggtctgggtatagatgatggctctgtggtaaaatgcttgctgtggaagcccgaggacctgagtttcaatcctcaagtccacaaaatagccaggcatgcctagaagaccaggatagacacatagggagatagcaggtggtgctgggagaatctctagaagcttctggggcagccaggctggcctatgacacagtgaacaagagacagcatgtcccaaacagggtgaaggacaagaccaacacctaaagaccaataacgccggctgtcttctcacctctaacacccaccacggattgcacgcacctgaatttgcacactcacacacacacagacatatacatgcacacacattcatacatgaacacacacctgtacacacaagcacacatatatatgcatatgcacacatgagtgcttatacacatgtcacacttgtatatatgtgcacacacatgtatatgcatgtatgtgtgtgtgtgtgtagtgtgtgtgtatatatatatacacatgggcacatgcatgaatatacatatacatgcacactcagacatgcacacacatgtatacaaacttgcgcgcacacacaagcataagcaagcacataggatcacaagctcacactcaagcacacatatgccatgtgcacacatgtgagaatctgagccctgaggccctcctgccccttagggtttgagattccctggacagagtaagttgaccatgcatatttgcactggcttcctccttcatctgcacatacacactgtctgtctggcagggcacatttttacagctgagccctgagctcagcatcaaagcctccacgcatgccatgatgaccctttctgacagtgtgggacaagctgccttccttgtctcagctcatcatctccctgggcaatgttcctcagcacacatctgaacaactccacatgcccaatcttacatcttgtaatgaaaagactatttaaagagattagtcaaatacagaaaatccaaatgtaatactgctaaatctccacattgtgatctctgcatttaaatatagctattacacaaaagataaaatatcagttattagggtatctggaattagggtatcgataatggagttgcatgaagcagtgtgagtctttccagaacagctaagaatccctcatgggtccacaaatagaactttagtaggagtgaaattacacaacatgttcaattcaagattatgaggttttataaatatgctgatgactaaactatcaaaagcgtgtgtgcttcagttcagcctgattttctgttgaccaaatcactggtagccatactcaatttaagagaaagagtttttttcccaccacggcccatggcatgtgcatcacgtgactatccccagagagacgtgaacacgtgcctattcacctgagagaatgaagagacagaccaaaaaatagtcctgcccaagtctagattagtgaaataatgcatattagaatttcttacagaaacatgggtgactcaaaggtagctgagtcacccccatccctacccacagcatgggtgacaactgtgaaagccacatccttcgagctccctgaaaaacatgacagggagctgtaccagtgactctctctagtgactacttactgtttatccagccttggagtggggcctcgaaatcttgttcattctggacttcttgagcccccagtgtcaggatctcctcagccttaatgacttattgtcaacccaagtcttataaaaaactctcccgctaggagggactgctacagagagaaggaaagagtcacacagtggtgcaaaattgaccttgtcagtaacatttctttagacactctcactctagtctaaataatatatttttaacccatgctctggaaatactgatcccaaaatctcttctccacgtgactgtgggtagtgcttctatctccttagacgatctaaacaaggacataaacatacagagagacacacacagtgctatctgcttatgcaatctaattgactatgtataatatattatacatgcaattagaaatgcaaaagtttaccctttattagttgaatgttctttcccccatgagaaccacatctctcccactctaagaacaacagcccatttctgctttgtgcccaacaatgcatagcactggccagacagcttagacaacagaagcccaatgggagagagaaaatacggtcccacagctgaactgtccctcagtcatcaggcgaggcccctatttgctccctggagatgctgaagggtgcaaaaaggccgggagagggtggttcttcatgatgtgtccccttgaatatcttctcctgggtacacatcctggtcctggtccagaccctgcctccttgcttcatcgttgaccatcatatccaagtcatggatgctgtttccatggcatcctctcagcagacacggggcaatcccatccccatatgccacaaggacacagagactggaagattacgacatttctgagtggaaacctcttaccctatgttctgtgtctagtaaaaggtggccaagatgggcaaaatggaattttcttctagttcttttagaactgtggttcagaacccctttggcaaagcgctgtctctaaaaatcatttacattacagtttatagcagtagccaagttcagttacaaagtagcaatggaaacaattctgtgggggtcaccacaacttgaggaactgtgctaaagggtcacagcattaggaaggttgagagccactgatttagagagtagcaagctagctatctccgaaataacgtatttaatcatttacaccccaatatcagttattgcccctgtgatgtttctgacgctacaagtctctccaggtcaccaatacaaaagatgggggacttgaatttcttttgcttcagtggattaccagagctccctaatctccatggtttttccagccatcagatcaaggcaatgtcagaagctaagttagtcttgggagtggtgatgaatatatcagatattcaaggtctgtacagaagaaaggaaatttgactgcgcccacacagccactactctttaatgggctgcgcccctagggagcctcactgctaatgtaactcagaggggcccagctgcctgaggatttcaccactgatttcaaatgaattgaaactttgatccattgcagcagccagaagaagccattattacatatgctctgtagctacattttcacaaatgttaatttctcagttatattaaaatcaattttcttaaatagccgaagcgcaccagagtgaaggagaaagccactaagacaattttgttgttgttgttgttcttgggcattttgcaatattatgagtctattaattttcccaaccagcaggaagagaattagaaaaattcaaatattatcacaaacaggatattagaagtcagctcttcggtaacatttttaactctcaaggatacatcaccaagctcttaacttactagaaatatttatttgcaaacttgtgactttgagctctccatagactgtagccactgaccgtcacctaactttctggtgagaagaaaaggaagtgacccgccttaacgtatgccagcctttgatgcttgaccacacagcccacagggaggtcggacatctcagaaacaaaatttagaccttgccaggacatttttttcctggtgttcttagagactgatttaatattgaaacattttggcggtgtgagacgttttggatataaaaaatggcccagtgagtagcaggactgagtcgggtctagagcaaagcacagccaatgctgtgaatttgacagcttcctgggagggtgctaggtttcaactaggaaacacactagatcagtggtcctcaaccttcgcaaggctgtgatcctctaatgcacttcttcatgctgtgctgacctccaacctggacatcattaagttgctacttcataattgtagttttgctgtttgtaatataatatctgatatttgagatatctgatatgtctccctccctctctctctctctctctctctctctctctctctctctctcacacacacacacacacacacacacacacacacaagggatggcaacccacaggttgagaatggctgccgtggctgcttctctaccctagacacaccctggtcgccctctggcatgtcacagatggatctgctaacactttctaaggcccatgtagtcctgttggtgtcttaaaaagcaaaactcgagtcccccagtatttccaagcagcttcctttgggagcgaaagatttctgtacttcggttgactctctccagcttggccaaagccccattcctttgcctcagattatttttctcttctctcccgctgccaacgtatactagctgcatgcgtattttgtgtttcagcttattccagcactacaggctctacgagtttctgttctactccaccagggaagaaattgtcatcgggactgaggtgagtgaaggagccggggggtgggggtgggggggggggggacgacactctgctggactatttagcgcacctgtatctggaactgctcagagcaattccgggtcatgcatattgaagcgttattacaaccaggcactaacaagaatactctactcatgccaggtgaaattccagttaagaaaataagctgtctttgagtgttgggagaactgttagttgcatatttaactatcttcagattgttggacaaaccactgtcgaatagcattctcttgtttcagcccaaataaagtcaggagatggaccaggccccccctctccctccctctcccgattttctgctgtcttcctctgctcccttttaagacctgcttcaaacctcacttcctccctggagcaagcctgattcatggcattgtgttttctaacaaaggatttgagctcattctctacacacagcctctgagggttttatcttctcttttctcccccccccccccttagtttcaactgaccttcccttgctaaattttggctcccattacccaaacatccatcatccttgtgaattcctcccgtgtctcctgtgggttcatatagtcaagcagctcaacgggaatgttcccccaaggaggaggtcacatgctgcttttccctaacatgtgacagtccgtagtgtcacacaggacagggaccttctgaaattaaccctaaagaaccatttgggtgacaaatggaagaagggaggttttacagtgaacagtctatggcaagacaggaagtgttctcagataagtcacgcaagtgcagtattgggagtgaggatccatctcaatgagatgaggatgctccagacagtgctccagacagtgctccctcttcctaagcagctcctctgcctcctagaaggacaagtgacaggcattgtcattaatggtgaagagggagccccaccctccatccacctttcctcagatgaagcacgaggcagacctaaccctgtaccatctacctagggaggcttgggttgtgacagtgcttccagatcggcagagacagatgtgtaggtacaggaagaacatgtcacagcatttgtctcctactgtgtgcctctgcactgcaaggcccaggtctgatggcatcctcgagcatggaaaagtcacacggacgaggtggacagggaccaacttgtttactgtctgtggtgcttgccccaagctggtcagagtgacaaagtgtgcttaatggaaggacgctgggtcttccagagctgaactggaaaggaccaccaaaagctgctaccgtgtactttgtggtattgtggaagtctctgatgacttctggggcaaatacctggtcgataattaatagagagagcaggagtctgggccactactacctgactgcttatgctggtcccagagctctgggctcaaatgagagatgctggtagtcatgggcatgtttcagattcaacaagctaaacatctatgataaacctgagtttctttcttaactgttgatagaggatttgagagaaatacatatgcctctattcacagatatatccagatcataaatgaaaaattgtaaatggcattcaatgctcccatattccatctgccaattaagtattagacccaggccatgttaattggcagctgccaaacaaaaacggaatagccaagtattacaggttacataataaaacggtagacatctatctgacagttcttcctgctggatctttgaactggtcaaaagttctgtttttgcactaacgactcatttgctgggaatatgggaggttcagatgagtgtcagaggtgtcatgggaatgcagtgagcaggcctgactgtgtgcagttgtgttggacctatgacatggaattttaaaacacaatacaggggggaaaacatgaaaaggagggacctatggatagaaatgactgccctcctccaagtgtactccagacattttgttcgaagcacacagtgaggcatgaacgtggtttaagtgtgtccatcaaagacccatgtcggctcccggtccccagtgtgacactgtggagctgaggagaccctgaacagggcagtacctggtgagaggatatgtcattagaggagcatcctcagaagggattgtggaacctaatatctcgctgacatcttgatggaagatgagagctcttccctcaacacacacccttgccgcggtgtcactgtctaccattaggatctcaccttagtcacggccaagtgagcaactaaatctctagcactatgagacatattaactactcatcttcataaagttagtctgccctgagtactttgttctagtaatgaaaaaaagaaaaaacgaaagaaagaaaaacagaccagtttgtcctccttcaaacaaccagggaaacagctcgaagcataagctcagcttagctgagagaccatcaggtatttgagcaccagctagctgtgcatttagtaatgactgtgtgctaatccgtgtacttcagaaaaccattatcagtgtttaaaagtttgcaaatttgactaagtggaggaacttgggacggggcagaattattctgggttgctcaggtgggctcagaaatgatcattagtcacctcagaaaagaaagggggaaggcaagagattgagaggagagatttaaatatcacatacacggtcatgaaagaagaggcccaagctcagctaactgtcctggcatctgttatgggaaggccctgtgatttctcaacattagattaaatattattgtatgttatcatcattataaaatttaaatagaaacctaatggatatgcagaaatctagcacatggcacatatgagtatttagaaggaaaaaaaaacagcatttagtatcaactggggtaaccctctatatgctagacttccaccttatacaaaactctaaaccgagttcccgcactaacagcctcttcacctgcggcagacacataccatatcagcagactgtaattcaccttgccctaacctttccactgagaactaggaaaacagggcaggatgtttttggttttgttgttgttgttgttgttgttgttgttgctgctgctgctgttgttgttgttgttttcaaacttaagtatgtgagatctcagctatcagcccaaaaccattatgaatatgggtctggagagatggcgcagcagttaagagcacattgcttctgcagaggacagtagttactcagctccaggggacgctggcgccctcttctggtcaccccaggcacctgcactcatctcacaggcttacacccacacacatacacatccttaaccctagtaaatatatctttttttttttaaagaacctatgaatctccaaggtaagcctggcagttggtgatgctttcgacctaagcatctatcagttttttaaaggaggtgaaggcactgagaaaataagaaggtctttaatgaacgggaaaatagtgagagaagagagtataggtcaccctaagaagtgtgtgccacatgccaaagatcacctttggggaaattagtcctcatatggactaaattcaacttaaagattctctccggagtattttatcaacaatatataatcctaacctcctctaaaccaaaattgcactgcaccaccagcagcagcagccatttctccataaccagaagccagcacacatgaaagtcacccatcacagaaaatacaagcagactgcgggagcctagatctccccaattaggctaggctgggggaccagaagccttggtgtcctgcatagccacctccaacactggaagtacctgtcaccgcatctagcttctaatgtgcttgttctgaggctaaaactctggtcctcgggcttgggtggcaagcctccaaggagcagggtgtaagtggggaccggctgggaagcggaaaggggtgtttagccctgtctgttccagattaatgctggcacttaacaatgtaaaggccttcgtgcaccacttgtataaaaagacaagaaccccagctgatttcacagaaggaacattttgtaaatcaaggttaggtgtatgcttacacttaccctgatgtcctgacagatagacagctggtcgagggacatcacttgagtttgacaagagaaaggctaaatggagcttgacaggaaaacaactggtggattctcaagcccatgaatttaagagttttacaactgttctgccatatttaacttgtaacaacagccctaggtctagctgaagagtcacttacagaccagggagccagcctattctactgtcgcagaccaaatccccacccccacccccgccacaaagatagaattgttttcatgaaccatgagctgtgtatggcatcttaaaatatttattcagtttaagttcagcagagtgacaacaagcagaccttgcatctcaggcacacgcaaaagttgttatgcatgtgtgcatggatgtatgtatatgcacgtatgtgcatgcgtgcaggagcgtgcttaaacaagcccataatgtgtgcctttgagagatgaaaattttcataagatttggtctctttcaatatttctcccaacttctggactgagatgggaaaggcggagccagcagggttactactctgcaggggacgctctgccactcggatgcccctagtgccaccgagccgccagtgtagcaccacggaagccattcccactgtagcatatgtggtcacagtgcaggccatggcacatcccatgtagccattggcagaaacccagcccttacaagcaatgctgtgcccggatgtgactattatatacatgtaatagatgtgtggagatatttaaagagaatcataaatacacctaagtgcctactttgcctgaagttatactttggcagactttcaaatcccaaagtaataccagttcaggtcagcaaatacaggaattcggagctcttccagctcagcggttgttctgagtccatgctcttaagcaaacacaaaataaagaaaacatttttcctccctctgatttcaaaagccacccagattatgggtgttaatgacattgtagttggagggtgaaaaagaccaagacagaaacgtaaaatttcttttattcatttatcgtatgaagtcagataaaccaaacaggaagcctcagtaacatcggctgccgccactgtcttgtggataagagagcaatgcaaacagcattcaagtctggatagatttggaaaggaagaggtaattgaagggtagctaccagtacccttccttcttgagtctttccttaaaatacacctatgaaaatcacaataccgtgtaactacaactccaggggaatccaatccctgtggctacctccagcacctacactcacatacatatacccactcgctgaccaaaaataaatacacaattaaaaataaaataaatctttaaaattaatgcccaaacttacacagatgattttctttatcttgaaaaaggtttctgtcttaaattagcccattagcaagcttctgaaaaaaaaaaatatcacaatgcatgtaatgtgtttgacccagtggaataggaagtgtgctgagaaaaaaaaatccatcagaaactgttgtgttgaaataactttatctgcccagcctggcatgcgtgacaaagtgaccagagaatctgtcacttaaagaaagtggtcgatgtttcagcctacaattcatcaaacctcactctcggcttttccctccaagctctgaaaaacaatcactctcccttaaatatcaatcgtctctgagaaatttgggcaaatttgtctccagccaaacaattgataaatggcaggtgcataatttaaagatggtttccatagcannnnnnnnnnnnnnnnnnnnnnnnnnnnnnnnnnnnnnnnnnnnnnnnnnnnnnnnnnnnnnnnnnnnnnnnnnnnnnnnnnnnnnnnnnnnnnnnnnnnnnnnnnnnnnnnnnnnnnnnnnnnnnnnnnnnnnnnnnnnnnnnnnnnnnnnnnnnnnnnnnnnnnnnnnnnnnnnnnnnnnnnnnnnnnnnnnnnnnnnnnnnnnnnnnnnnnnnnnnnnnnnnnnnnnnnnnnnnnnnnnnnnnnnnnnnnnnnnnnnnnnnnnnnnnnnnnggaggggaggggaaaagtcaagagaattgttaccactgctaggtttctgccctcagtgctgacacccttgatggagatctgcaaccctgtgttctgcctcagaagctaacttctcaaaccctagctctcaaccatggcgcttagtatagaccagccattatcacttctcttggtatgctccatatgggcctacctgcattcaaccagtgctccaaattttaccacatttaatggtgaagagcaatgaaagcagaatttcatcttctggtttgaaaaacgtcacatttgcgaaatatgattttgtttgtccagtgagaaacctacgtcagtctttaaattataaatgttcattccccgaatcttttaccaagggctcagaagctgcccttaaaagaaaatatgtttctgctattcatgtttaatcatgaaatttttcttttatatggaacaccttttgaaatgtcaagatcccagatgtctttgcctacatcagaatttttaacgcatatctgggggtaggaggttacttagacaaatagaaaaaccaaacttgtaaggcgaaatctgtgatataaataagcgacagaaaggaagtaactctgttgctattgtctgcaatttcatgtcacagattaatacaaaagtcttgtgcccacccgatgacgcctgcctgcctgaaggaaatatcaaaagtgtgtttatggggctgcagaggtggccctgcacttaagagcctgccctgtgctttcagaggacctgagctctgttcacagcaaccgtgtgaagcagctcaagtacctgcaactccagctgcaaggtatctgacatcctctgacctcggcaggcactctaacacagacacaggcacagatatataattttaaaaagatatttttaaaaaagcatatatgtacaagaagacacttaaatagccgataaactcatgccaagattttcaacattttcagttctcaaggaaaggcaaattaaaagtcccacgtggtggatgtggtgttaggagcatacaggactgtcacaatttgagggcaagcctggatagacggtgagtttacggtgagctggggcgatagagagacctttcctcaaatctcccaccctaggaaagaaagaaatgtcaatcaaaatgtctacattctgaaaagtttaatctgcggcatcctctcttgtgagagtgtggtaaaaagcacccccactggaccgacaggaacagaaataaatgggttcgcattctactgacaactgggtattgttgaaacgtggtcccctttcatccaggtctgtagttccctgagtttatctcaagtgcatagccagacaaagggcagaaatatgagcgtgtacatctgcatttgcctgcaatattgaaaaagtaacatagattgtgacatgcttaaatgtcctttatcaggacnnnnnnnnnnnnnnnnnnnnagagagagagagagagagagagagagagagagagagagagtgtgtgtgtttacactcaggggcttggaagggtctgtttatggttatgtacacccatgtttgagagccaatggaggccagaatagggtgttggatgccctgggtctggagttttaggcattatgagctttctgtcatgggtgcaaacaaaacaaaacaaaacaaaacaaaacaaaacaaaacaaaacaaaacaaaacaaaaacacctctggaagcagcaattgttctgcaatactgagccatttcttcagcaggcaggcaaggagggagggagggaaaaaaaactttttatttgttttattttgtgtgcatatagacaaagggtctgaggacaaattgccagagtcaaagggccccagggttagaacttgggtcctcaagttcggcagcaagcgtcttaccttctgaatcctctcacctgccacctgccgtggttttcgtatttgaaacaagggcttatgcatcctaggctgaccttgaactcactctttagctgtggattaccttgaactccagttcttcctgcctccacctcctaaatggtacccacaaacaactctgtggtgatgaagaagtgtcccggaaatgaggtcatgacctggaacaatattcacgtcatgttagacatctaattagacgaccagtgagacatgcctattggatttgaaattctggttcatctcacatctctgtgtgtcactgtgattacctgctggtgggacaagactctccggccctcaggaagctggttggcaccgtatttggctaccagttctttctttgggatctctgatttgacaggaatcttggccacctttgtctttgcctgagccagccagacctctccctctgctttaccgtttgctgtctgttctaccatgctctctcaccttgtgggctctcttcaagctagcctaagtcattaagtctgccaaagactttcctacttagaaagatcttgcactgctaaagggctcagcaaagctgttaaaactccgcatcaaccttgaggtcccttactggatcagcctttccttgaacccctctgcaaacagttctctctggcccagtgacccggagttccactacagcttctcttattcttgtctcttacactatcagctccctccacagcctctcctttatgctcctccagacccttctgcttgagggaaccttggatgaggatagccaactaaaggctctgataagctggtccatcagggactgacttcactcaccctgtctcaggctataccacctttgccttaagggggaagataggaagtcacatggcttggtttttctgtctccacaatgttcaggctgatcccatctgttcccatgtgctatgccctcacaagccaggctgcagcagactttctcactgcttgcttaaaatggctcccctaatttcagaagctcaagccctgagcatttcctgatcaccctgggttcttggacagggtcattgttaaggctgccatccttatgttgggtcatgaatttttttttcctcttaaagatcagatccttaggatatcatccactgattttttactatgttctcctcattctctgaatcttcccatgggttccaagttcttagatcccaggaagggtttgtttaagtgcagatctaacttgtactcttttctttctggcccccatgccttaagtatcaagccaacacctccatctgcatttatttaatttacttgccaagccacaggcttacatggaggatggtagccgaatcttcctttctcattccaattactcctttatgtaaacaggtgcctgctgtacacaaattaaaccttgtcagccgccattttggcctcgggtacatttctaagtatgcaaaacaaacatatcagacaacctcctcagctgcttgccaacaatctcaacccttgtgcactaatctccaagactgtgaaatttcctcttaacctttaacagtttccagggcatctctatttatgtggtagatgccattcatccagcagacacacatagcaccccatagcacatagacaaagactgccatcttgggattctgcccacagacactcctagtcctcagcctcagatgcatgtctcaccactcacaccaagaactgtgcatccactgtcacagcacagaggcacactaacaaacctccgttgcatgctcctctaccatctactcattcctccccaagtcatctaagccatgcccttgtttgggcaccaattacgttgtgtgacaaaactgtttctgaggaaatgcagtactcacgcccattcaaccacagataggaaggctacaacaaaccaaagtatggatacgagcaaagtccatctctgtcaaacagtgagttgtattgggactgcttatagaagtgtgtgtgaggggttacttacaggagcagaaatgactcaaaggcagccgcatcaccaaagcccacacttcacagcctgcaggcagctcaacaggttggagaatgtcctttctctgatctaaacctcagccaggcaactgggatgtttctgtttcttcaaagcagctggtctgacctcaagactcttctttgcagcttggcttgtttctcatctgaggtaggttcttcccttcatagtttactccagcaaggtggggcccagtgaatctgttcagtttcagggacttctggtggccattttcagtcatttaccttcctgtttatggagcttccctgcaaggtggaatgttccaatattagagaaaactgttgttacagcagacttggggacatatgtcaaattggtggtagcagtcaccctatgttggcagtgtagtaggtaagcctggcttccttgcttttgtctctgtattctggcatgattttcaataggaaacgtgaggctgtttggttttaaggatagaggcatcaatatcaaagtttttcttcatcttctttcttttcactattcagcctcatgtctctcttgctttttatttcttcagaggctcactcactatgaaagcacctgtgttgtttctgaagggctgcattttgtgatcatgtgatcaggcagcgtgcttcttaaagccaagggttctgtcacagatgaagattccatagctatctgagcaggagaatcatcttagtggtttcaggttgtttaaattacacaacacaaacagtgtccagggcaatagaagtaagatccagatgacaagagctctggccacagcattttgctacttaaaatgttatctgactaatagatggtaggctgtagaggacctaatgccatttgggaaaaaaagaaccaacgtgtgatctcgggcccacagaatgcattaataatcccagatttcatttccggacaaagcagcctcttctatgttgtgtggggagccatgcctccggctgagcggcccaagtgctaaaaacatttccaaatgtttaagagaaagcagcatggattttctccgacccagaagcctctgaaaaataaaaggttcccccagtcaagacagtcgtcagcctgcaaacgtgaaggagcagctacatacaaaacggaacagtctggtccgcagaactcccaaggacagaccagaaccggcagatcatttgggggagggtttggactaaataaatgctcaatttccagccaactccttgaacaactttacaaaatattacagcaagaataacattgtgaagcttcagatctggtcagtaggtgatcagttatcacctgccaaggccttgtgcgcttgagttcaagtcttctccatcttgtcccctccatttttcgataatttgatcatttaaaattcacactcctgcctcaaaagagtgcggaacacagtgtcaggcttctagcactgggtggaagggttgggacacttcttccaaagttagtctatacagagactatgctgccctcttgggtgctctccctgtgacccctctcattcattagtgtgtattaactgggaatatctcatgatattttatgcataaataatgtaatgtcattatatttactctcagcctccccttgtgcgggtcctcctcaccttctcaagtagcgttcctccactttcccatcttctctgaaacactccaattacatgtataagaggaaatgtacaatctattgtctccccaagcctggctgttcccttttaacctgaaggactcctgacccttttttagaaaacacatggtttcattctttgtagtggctgaatgggacaccactgtcttgtcacgtgacaagacgtttccagctgtcagagttgcaacacaaacggactgaaacccaggatagaccagagtatggatcccaccaaagtccaacttagtgagccagtgggctttcttgggagtaattactggagtatggctgagcggttacctttaggaagagaaaagactcgaagacagctgtatcaacaaaggccttcccagcatgtgtgacagctcacaaaagctgggaacctggagctcactgacagcctgtaggcagctcaacagattgtggagtgttactttcaggtggctcagttggtctacacagtttccaggcaaataggcttgtttctgcttcttcctggtaactgctcaggtctcagaaacttctttgcagcgtgtcttgtctgagagtgaccctcagctatctttattgcttactctgggaaggagaggccttgtgaattaggtcagttttagagacttcctgtagctactttgagtcatctactctgtcttacagagcttccttaagctgaaaggtacccatcttagaggaaactgctacacaataggtgtatgtggtggctttcttcacatctgtgcattgttgcctgttctgtgacatgggggcactcagaaacctctgcagaggtcccacagcatctcacagtgtcatgttcatgggcttggaagagacccctcctggctgagcctagtaagagctgtaggtcttgttgatcacttgatcacaaccgtaagagtccttgaggcaaaatcctggtagacccgtcctgtggtgccagttacacaggactacatgtctctaaacatccattttaagtggtcatgtttggggtaatttgttacaaatccccagataacatatgcctgtctccttcatgcctgaagcaacccaactggaaatgctaggtctcatctctctgtatccctacttgtctgttcctgtccatactgccttggatggtctcctgcccatccctcttaaaaacaactgctgattctagttcagatattcagttcaacaccactgcacataaaagatgctcagcaaacatcgacgcacaacttgactgccagtctcttttggcttatatgaagaaaccaccatcccttgattgattgattgattgattgattgattgactgactaattgattgatatcttaatgactcacactgaaaaccagagagacaagtagatgctcatagtcatctataggatggaacacagggccccccaatggaggagctagagaaagtacccaaggagctgaaggggtctgcaaccccataggtggaacaacaatatgaactaaccagtagccccagagctcatgtctctagctgcatatgtagcagaagatggcctagttggccatcattgggaagagaggcccctaggtcttgcaaattttatatgccccagtacaggggaatgccagggccaagaagtgggagtgggtgggtaagggagcagggttgggggaggatatagggaactttcaggataacatttgaaatgtaaataaagaaaatatctaataagaaagaaagaaagaaagaaagaaagaaagaaagaaagaaagaaagaaagaaagaaagaaaaaggaaggaaggaaggaaggaaggaaggaaggaaggaaggaaggaaggaaggaaggaaggaaggaaggaaaggaaggaaggaaggaaggaaggaaggaaggaaggaagaaagaaagaaagaaagaaagaaagaaagaaagaaagaaagggaaagaaagaaaagaaagaaaaccagagagacatacctaagtgtccagagctaatcgttctataaacaaggctttgacctgaaagccaaagcactttccctcccatctgaacctgttagataccaagctgagctacatcgtcctttacttctacaaaagccaatatgcacctctgttcccacacaagctgggccatgatgcaaagaaaacctaccaatggccttgatgtaagacacagtccctagttgataagtatttcgaagtctgggtgttgcatgcagtcctatgctacatggttatcacgtttactgagcaaatgtgtgtgccttccatccttacacatactttgaggtttagtgtttgtggtccataatttccagtaaagatatttttactacaactctctgatgtaagcttgtactacagccttggttgcttgccctgagaacactggcaacagaaactgacatccatttgctaagtccatgagaatatacttcacaaaggaaagatgcaggttagtagaacaagctggatcagcaggttttctggtctaggatcagtggatggtgggaatccacttgaacccagtggtactgggcagagctcacaggataaagtccaaaactgggcacaaatcccaggcaaggcaagttaggagaacatttgccatttgcctggtatatccaaatatgttaactctcaaaccacgcacacttccaagcagccggaggagataggtaccactttgaagactgtggaaccctggaagatggctgtatggttaatcattgtcccagatgcttgatggataggtgatagagtcactctggaatgaagggttttggtgcccacttatagggttgagccctaagtgacatgttgataagcatcacaagtttcaacagttaacacacaaaatgtcactttggaatggaagattgtggctcccacttgtagagtcgagccctaagtgacgtgttgataatgctccaaagtttcaacagttaacacacaaaataggccgtagtttgcctttattgccttccaaacatacactccttaaaaaattaagtatggcataaataacatcgtagcaaagttattttaaatattcatcacttttacaaccctttcaacttctttactttccacccaagagcctcccaatggtctcattcacacggtaaataatgctaatctattacgtgtgcttccccgaacacacagtgtgtgaaaatggacacgctacatgtattaaattacagccaaagctgaggagagagaggggaaatgtggttcattagcccctgataaataatgaatgtatttgaaataaaatgatcattaagcacaaattagcataactgctagaaatgcactttttttccaaaagttaaacattcccttcagataagctctttggctaaagttccaaatatttaattgttctgttttcactaaacaaaggcagacaaacgactcaacatatgagctgtgtacattaaaaaaaaaaatacatgtaacagaacaaagcttgggcatcttctgtttatttttctagatttgtcttacccctctcttaccctgccatgatcctcagttttacactgcatgagaacccttattaaataagctgctgctgctgctgcttcttcttcttcttcttcttcttcttcttcttcttcttnnnnnnnnnnnnnnnnnnnncaggacagtgagaaagaagtggttttactctctgctgccttgctgctgaagtcacggtcattttacactcctccacaggcaaccacaatacttatttggacctcttctctctggataggggaatctgctccatccctgaccctgataactccagggatgagcagaggtgcataatgtcatcattttccctccaagccagtcttctacaaacagcccctctgctcagtccacctcaatcactattgtacactgagttagggtttttttctttcttagaagtttgagagaaagacaaacagatagcgtttgtgtgtgtgcatgtagtacagataacactgtgcaggagtcgaggaaaggctgggatggaatcaggatctataaggggagagagctgagtagaagcttgggcagggtgcaagtgctggtatgttcatgtggaacctgagaatctgtctacttcacccaggaacggaattagccaccagtctgctcagttggttgactgacagcttaactcacccatcgctgtccagcagagaattaggttgatgagccctacaactgaaggaaagatcctgacagctcaagaagttaaatgcccatatacacagtttactgtttcctgaccatcaccactaacaatgccctcatcaagatgtgaatgatgcccgagagagggtctccactataactggtcaccaggggactgactctgcactctaagccaactccggggagtatggtgtgcttggaaccaagcttgtgacagagaccatgctaagggtccccactcatgcattgacatatttatattttcctaatccctgagtgggattccatactattaatggaaaagaggtactgggatagaatacttttgtgtatgtgggtgtgcatctgtatacagtacatacacacactaagagggcaacatccaatgtcattcctcaggtactgtccacagagtctttactgagagaacggctctcactgggttagaacttgctgattaggctagaccctagaccagaatgccccagacatccacctgtctccacctccctatgccaggattacaattgcctagattttatgtggatttgggggaccaaactcagatccgcaatgcttgcatggcaaaatctttaccacttgatctatcttgcccgctcacagttaaatatttttaagggatatttccagtaaaaatcaacacccatcatcaatgcctgtgccggtgcatgnnnnnnnnnnnnnnnnnnnnnnnnnnnnnnnnnnnnnnnnnnnnnnnnnnnnnnnnnnnnnnncataaacaagatggtgcctgcctaactaggaaagtagtgtctcagttaacccagcaagttaacttcctcctgtagcactttaaacccaggatcagcacatctggggtggagagagttgtccattacctcatttttatcctctggttcctgacccagagcagacactcctcaccacgtgagttgattgaatgcatgactgtgtttgaggaggctacctgtaggaatggttgctttatcttctcctttcctccatccgaacctcatcccacctcgtcatggatcgcctcctccttgggacatgccctctgtctcagtccatgaatactgctgagacaaaagtgccaacaattggatggcttagaaacaacaaaaatagttcccaaagtcacagagtcaaaagtccatggtcaaggaacagctaacttagtatctccagagggctcgatttctcctcctctgtaggtgactcctccttcctgtgtcttcactagaaagaaaagctcctgtctgcttccattgatgaggcagtaatctatctggacaaagaagggtcctgccctcaggactcgttcacctggaaaggtctcaccccaaatcttgcacccttgagttagattccaatgtacatgtatcaagaccacagcaaagttccactctggaaagagtattacaaggcataaattacacagtgattgaaatatgtagaaatacagaatactctataaatctgtctctcttcctctcgtgcctttagtatttcagatgctgaacgcattacaggctctgaaataaacatccgtgatgtgccgctggacgcagctctcatcctgagagcccacacgctagtcgctccttttatgaaactcctaaatatcatattactgcccatggggttgcaaaatatttctacgccttttatggttaaaatgctccaagaatttggactcgatcccacttgtgaaagttattgcaataaatccaaaatgaacagacacggaaaatagttaacattcagctgttaaaactttgaagaggcgaggtacacagttaattctatgtcttgtatttctgcaaatcataagagacagtttaaagtgtttaccccaaagaggctcacctaatcatatctaatgggagacatcaacttgtgtcacccaaggattattccttaaaaatgcacacattgtctgactttacttggaataaacaaaaagcttaaattagattattgcttagacatggagccattaaaattaaaataaagccagacatttggaattaagtccatttaagagagtcaccttgcattaaatcatgaccacaatatttgcattgttttttaacctttatgccccaatcataaaaactgagttaaaaaaaccaaaaaacttcataataaacacacagtaggtgcacagtgcttttacccaaattcctaaaaccaggcagagccttcaaaggcgtcttttttatatccaacagtcaatgcagacacccactgaaccattaaagacaaaaactctaaggttctaaagtgccctgacttctcctttcaaattaaatcaaatgaacagcacacatcccccaagagcagttcagtgacagccccttccgtccttttccctggaactccagttctacacgagggcctgacagacagcaaatccaagccaatgtggtaacaggggtggggcgggacccactttatttatagatgcatgtgtgttcagcggctttgaaaaagcccacatattttttcagatgaaaggaaatatttgtgggggagggatgaaacgctctcctggtcattccaaaatgaggaactaagtttggcagaggtgggcatccctcacagcccgtgggacttgatgagccccccacaatttagaatgtcaggcttctgcaccccaaacacaggaaaggcactttagatacttttgctgaaaatgagaagagatttgcctggtcgctgtttctccattgagctctttgtgtgtggttgttgcaaattttgttctgtaccatagacttctaatgctaatacagtgtcatgactggagaaataagatgctgaatctgtgtgtgtgtgtgtgtgtgtgtgtgtgtgtgtgtgtgtgtgtgtgtgtgtgtgcatnnnnnnnnnnnnnnnnnnnntcctgtgtgtatatcccatccatgcatgtgcatatatatggagcatagatgtgtgtgtctctatttgtgtgtgtttgtgtctgcctctgtatgtgtatgtttgtctgtctgtgcgtatgcctgtgtgtctgtgtgtagatgtgtggtcatgtttgtttgtgtgtatatgtctttgggtgtatctgtgtgcttgtgtgtctatgtctgctcatatctttgcctatgtgtctgtatatattgtttgtgtctgtatgtctctggagacagacagtgatggccaccttgtgatggtaggtgccctcagagtctcagaggtgccctcagagagagctggaggcctacctatgtatttatgtgtgtatttatgtctgtgtgctatagacctaatgtgtgtgtctattttgtgtgtgtgtattatctgcgccaagtatgctgtatgtgtgcagcctgcctatgtatatgtctatgcctgggtgctctctgcctatatgtatgtctatgactgtgtgttctctgtgtgtatattctttctgcctttgtgtatgtgctgtctgtgatgtatctatgtgtctgtcgtctgcttatgtgtgtatgtgtatgtgtatatctttatgtgcattctgtctgactatgtgcaggtctgtgtagccatcacccagaggcagtgatgaacaccttgtgattgcttctttctggagccctcagagctctttggagatactatacatgttccattgcatagtctgaacctcatgtacttaaggcgccagttatcttcattgaatatgcaatcaatgcaaaaatgtcctcactctcccaaacagtaggaatatgttaacagtagagcataagagtttacaaataatttcatatttttctaatgtaaagcaacaacaacaacaaaacaacttcattcaaaacccaatcaggccagggctatacagagaaaccctatctccaaaaacaaaaagaaaaaaaaaaaacaatcattttggcttgtgtgtatcttcttactttgatgttgtagctaacccagaacactctctaatcagagaaagtaaaatgggtggttcccaaggtccatctcaaactcttagatctttcaggacagtcaggatctgagattctctcatcatccaggctccaggtccaagggtctctagtagccagggtccctggtctcacccgctaccatggcagcaccaatgccagagacaggggcagtgactatgatgatgggcagctggcaggcagcaacaagggtggggagtatcatcagggatggcaagggcatgagcccagcctgccaggcaggcttaggtccagcaatgaatgcttctggacagaaaactcttcctcccaaagtgtttcagctcagtaaaacagccagtctcagatgattcttggtgaaataacttgtgtacgttattctgtgtggatagggactttgtaagcattgaggagtagggtgggatccaggagccgatgcatcccgttggctcagtttgagatgctagtgatgctctacttgcatgggggaagggcttcaggtgctttctctaggtggctgattgtcatggtcctctcagtgggttgtcatggtccagagctggtagagtggggcagggagttggccccatgcctgccgtactcaatcctgagtttcatggggtttgggctcactcggccttatcagttcttctgtctggtgacatgatccacttgccccccccccttccaaaaatgctgtcatagcttgggtttcgattgtgatgatgaaccatcatgaccaaaaaccaaattgtagaggaaaaatccttttttggctcgcactttctcctgaaggttcataaccaaaggaagtcagggcaggaactcagacaggataggaacatggaggcaggagctgatgcagaggccacagaggagtaaagcttattggcttactccacatggcctgctcagcctactttcttatagaatccaggaccaccagcccagggatggcaccatccaccatgggctgaacccttgcccatcattcactaattaagaaaatatcctacaggctctctgacctcaagaaggccttttctcaatttgtgggtccctgctctcaaatggcttgaannnnnnnnnnnnnnnnnnnnagaagcagagatttctgagtgactcttgtctctcagtgctactttacccctgtgtacttatggggctctagccaggagctagaaaaacagtgcactatctctacaaagcagagaaccgaataaaactattgaccacatttctgagtcccaaaaagtagagtgtgggcttaccaaagcagacaggatcaaggtgacaaggaggcaggaaaaggctacatgggcaggagtgaggtcacataggagcaatgttccgttctaggcacaggcaggtcctggactgtgaccagcagcttgttcatcatgaaaagaacatctatactgcagagcagagagcatagttaaagttcagaaaccagaagaaagcaggacaacaggccagtgggcatgagcctggagtgctacattgagagtcaagggtcagtagccagtacctcaccttagcaagtttaaaacacacaacccaagacaactcaacccatggtcagatggaagtgatctgctcccattcctgcctgtctgagagagataataagtcacagagccacagacaactttagctggagagatgtttgtgactggactcaaggaagagagaaaagggaggaaataggaataaaaagatatctgaagagattcgtatctgagtttaggagaaccattaattcacaaatccaagaagcccaacaaactccaagcaggagacacttaaaaggaaccgagccacagtacctaatgctaaaaaccaccaacaaagagaagcgttaaaacacccagagaatatggccatactgttctcttatggaggaccagagatgggtaatagagcagagctattactgaagacagtgggccacagaagggaaaccaaccgtcagtccagaactgtgtgtgctgtgaaggcttttgtgaaatgcaggtaaaatactttcccgatgtacaaaagcttaaaagttcatcatgggcagattcacattacagaaaatgtttgggtatgacccccatgcagggaacagtgtagacatgatagacgtctacagctacatgaagaaatggaagcaacgggcccctgtgtgggtaatcttttaactaataagatagggtattgtcaaaagaaaaaatgaaagcagtgtatcattggctttatgtcctacagacacaaaaatgtaagagagtgttagtactggcaccaatgggagagcgataagaaaaaatgctgttccaagtgactgtgcacaaacaggcagaccatcatttaaagtagactggatcaagttgaggatatccagtgtccccacataaataattgccaaaaacctagagccaagaagcaaacagaaaagggaagatgaaatatagctcttttcaatcctaaagaaggcaggaaaacagaccaggaacaaacagaagaggtgacatagtggattaaaacccaacttaatcagttgtcacattaaatgcaccaacccattttacagccctaagcaggtgacccagctacaccaagtgttcatgacatgcaattcaaacatgaggtcacaaagcacactagaagtgaaacacatggggatgtgactgtctcttttcctgtcactgtgataggacaccctgttaaaagcaacttgatgaaaggagcaaatgtttattctgactcagaattcaagggtacagtctgtcatgatggggagcccaagaaagtgggggctctaagcagccagttccatcaggaagaggacaagcaatgaatgctccctgttgaactccctctctccatctgtgtaattcaagatcccagccagggaatggtgccgcccacagtgagcaggtcttcccagctgaattaatataatcaagacattctctcacagacagtcccagaggccaactttaatctagataatctctcttagatttgcccagaagccaggttccaggtatagattctggcaaattgataattaatgctaactttaacacccaggtaacagtaataaaaagaaaagcaccaatgattttgtaatcatcagtcactgtcacgcctaggtaactgtcagtgagaaagttactcatagtgacaaagaggccaattcaacaagaatatctaacaagcctgtacactcatgtacattgtaacagacagtcaaattgcatgaagaaaaagctcagcataactaggagaagtgaataaatccacaatcgaaacagatttcaacacctcctctcaataattgatagactagggagataaaattagccaagatgtaaacaatttgactaacactagcaaacgctccgacataatcaacattcatagaacaacaacacagtctacacagtcaactatgcaaacaaagggtaccaagaaagcagcccacatcctggattctgacacaggccctaaattaatccagaattcttaacatatacaaagcatggtttgtaatcacaaccacatcaagttaaaaacaactcctaacaacataatggtgcaagaaataaaaataggaagcttggaagataagaaaataagagcaaaacaaaacttaggttgtaagaaaacaggaggaatcgggtcagtttttgttataggcatggccactagtaagttgaccacgccctactggatgccccaccaccatgtgcttttagaccatacttattagactcagtgggttatggaaagaagaaacaaaaagaaatgacgaggaggtaaggagggagggagagggacagaaagctgagaggagaatccaggatccagggatctgggaggagttgaaaagtgaatgtgatcagaatacattgtatacatgtattaaattctcaaagaataaggaaaattattatatatttttaaaactctcaacactatggcctcacctttcaacttgaaattctagcaaacaagaggagcttaaataataccaaacagaaaaaataataaagaataaagaacagagatcaattttcaaataataaggggctttttacaaactccttaaaatcagtaccactattaatgtgtgagcaggaaacagatgacagcggaagaaagaacccaccaatatcggaaataagagacgtggcaacagctaaacctctcagatgcagagacttctacctcccttctgacttaatgtgtcactggttcatagacactggcaaacaaaacaacaaaagcaagattcctgacacaaagttgaagaattaaaactgggaactatgaggagatggaggcatggctccattgttaccaactctgactgatcttgcagaggaccaaggttggtccctacatagtcgcttgaagccctctgttccttcagttccacagttccaacgccgccctgtggctccctcaagcccctgcatatatgtggtgcacatgcggatgcactgtgtaaatcaggcttatatacaaaataatcatacacataaaaataaatatagttttaaaaaaccaaaaaaaatcagattgaacttgaaggaggaggtgataaaaggaagtgaaaggggtaagagcagaaattaattaattaaataaaaaccatacaataataatggtagtaagtgatgggatggttctgtagaaaagttaatgaaacaggaaaactcctaaaaaggtttttaaaatataaagacagcaaagactacaacatcagcaacaaagccaggtgttttcggcagcaggcatgcaaatataaacattaccactgattatcacactatgaaaactgataaaatttggaaagttttaatagctctataccgaagaaaggaaactaaaatttcatattacttaataattaggaaataaatgaattcaatattggaagttcccgcagagtatgtaaaaagagatcagaatgacactacatgacactactggacaaacctgaccaggacagtaaaagaaagaaaacactctctaagctccctcctttatgaaaatgcatgggaaaaaaaacaccagaaacaaaatattaagagatcaaacccaagaatgttccgtgaccgtggcgtctttccagaacgcaaggagaatcagtcaaaacagctgcacacactaatattgagggattgtgtcatttttctcaggagctgcagaacagttgtcccacatacccaacacccagtcattataaagtgtattagcaaactcagacagagagaaaaatgccttgctggaggggtagcctttaaagattgctacaaggcccacatcgaccattaccatcaatgggccagtgctgaagccaaacctcctaagggttagagagaagctgtctgccgaggctcattctgtttcctgtacactggaagctctgctcaggctagtgggacagaaggaagaagtctgggatataaaatggaagagtgggcaccgaaactgtgcttgtcacacatgacacttctgtatagggagaacagagaggaaggtgaagaaaaattatgaaagccacaaaagagtccgtcagctagttgagtgcatggcaaatacacagaagagtatacaccagggagaagcaactagaaaataaaactgtaaagtgggtttagaataacataagaaagtataaaatgtctaattgccaatgtctggggtgtacatgcacagacgacaaagcgttgcaagcaacactggctcgttaccttggcagtggggtgtttaagtgtatgacaagatggggagaggtctttagaagtcttcagtgattgagaatcagtactgttccagtggagaaccctagttcagctcccagcacccacatttgtcctgtaactcctatcccagggaccccgataccttcttctgacctgcaagggcaactcgactcagctatacatgctcccccaccaagcaagtacacaattaaaaataaaaacaaatctttaaaagtaagtgaataaaaataatttaaagggcaaagaatagatttttttaaagtgctgaagatttaaattagaggctttattttaccaacccgagagttataaattgatagcaatttcagaacactgatgaattcataatgacataaatgtaggtggataagcaaaaggaaataagagagaaaaattaacccatacttacatatttgctatatgccattagattgtagagagaaagaagtcatattttcggtaaattattaagggtctaagaaatatttctcaaggaaaataatgaattaatgaatttgaacctctagctcacaatataaggagatatccttttcatgtttataataaatctcagcatgaagctaaactactcaagcatactcaggaagatagcattatagccctcaagagtcacacacacacacacacacacacacacacacacacacttacacatgtgcacacactcataccacagcactggctgtggaagaaaagttggtatactccgactggaaaaaggctcagtggctaagaactcatcctgctcttgcagaagacctaacttctagctctaggggacccaacatcttcttctggcctccttaggaatttgaactcacctgcacatacaagcacacagacacacacatggtcataattaaaaacaaatgtttttgttttaagttgttaaactgtacttgatatgaaggaattcttgtcaacaaaatggttcactaggaggacaaatggtgaagtaactcaaagaaacaattgtgtgacaaaagactcagttacataaatcagtaaggactgaccagtaaaccaccacttccaaatgggcaagaacttcataaatgaagatatccaaatgaaagattttagtgggatttattagacatcaagaaaacacaaatgaatggagctggctattcactctcactgtggtctcaagagtctctccatgcccacagatgacactcaccagacaataagattgggttccccagaaggagggttcctgggaggaagcagaagtttggaggttaggcccagtctgcactggctgtgttatggtggttagagtgagagaggccccgtagctagttagaatcccatgggaacagaagtaaagcccacttctcaatggagaggcttcagagaatctgcagctatccccagttcatccaccaacctcagtgtatgcttgtccaatgtgaaccgtaccaccaaagttcatttcagatcctctgtcttcctggactattattaatctcctccgaggaaaagacctcctcccccacccaccctttacacgcttcccatccacaccgtcactcagcagctctccatttgcctctaccttctctggggcccttagaacttgtgaactcatctctagtttgaataatcttaatttcaggttagtgaactgagacactccgctcagaggagttagcttaggatctgcatacgcgttgcttactaaaacccaaactctctaataggtcgaaatatgtttcctctcaaggttatttggctcactggtctctcctttatacgcaatcatatttcttagccatggatacacaaaataaagctaagtattttccagacacaaattggaggaaaagaagccatacttaataaggaaaatagcccagtctcagccacttactgagctcttaagaacagctgggctctgttagagcacttacctgcctgcaaggtttagaaggaaaataacaaagataacaaaagaaccgaaccgggaagaaaaaaaaatggtcctgtaggcactgaactgctccaagacaaaatgatgcacactggctaggtggagaggacgtgcagacttcacaaacacacacaggtagggctgcagaagccagggagagctgccttctgaattacattctacccttcccacattacccaccccacagaaccatatacttcacagattctgttttggggaaggaaaaaaaaaaaaaaaaaacaaaaccgtacatcagcttgtagcctgttagaactttgcaggattcatttaactttcattttcatgatgttaaaaatcttgaaaacccccattcaggggaaaaaagtctaatgggaactttgcttgggaaaaaaatgtgttctccataaagtcaattttacactattattattagggaaaagggatcaaatttataatgctttcattgagcaaccaaatctattgagtgttctgtacaatacctgatgatgctgaaatggtaaaaccaggagtggggagtggcaagatgcggaacttggcacgagcgaactccatgatgtgtttggaaaaaatatataatcaattatttaggtgcgatcagggcacattccctgccagaggagaggtttccacccagcccaggagggaattaccagagcatctgcaggagacatcttggttcccggactccaccgagactagtctgcacaggtgagaatgtggactacagaagttaacagcttctgggacaggcaggagccacagaacttctgaggcagcccccttttcgcactccagatattcaggcaccttccctgccaaaggagaggtatctgcctggcccgggagggctttgccggagcatctgtgggagacatcttggttcctggactccaccgagactagtctgcataggtgagagtgtggactacagaagctaacagcttctggggcaggtcctgtttcggggcttcatcttctgccaggaggcaagtctaaatgccagattatctgtgcaccttccctgaaagaggagagcctgcctgcagagagtgctttgaccactgaaactcaggagagagctagtctcccaggtctgctggtagagaataacagaatcacgagaggaacaggctctagccagagacaactataacaactgactccagagtttaccagatggcgaaaggcagacataaggatcctactaacaaaaaccaagaccactcaccatcatcagaacccagcactcccacctcagccagtccagggcaccccaacacacccgaaaacctagacctggatttaaaggcatatctcatgataatggtagaagacatcaagaaggtctttaataactcacttaaggaaatacagaacactgctaaagagttgtaagttctttatagaaaaacaggaaaacacatccaaacaggtgatggaaatgaacaaaaccatactagatctaaaagggaagtagacacaataaaaaaaaaaaaacccaaagtgagacaacactggagatagaaaccctaggaaagaaatgtggaaccatagatgcgagcatcagcaacagaatacaagagatggaagagagaatctcaggggtagaagattccatagagaacattggcacaacaatcaaagaaaatacaaaatgcaaaaggatcctaactcaaaacatccaggaaatccaggacacaatgagaagaccaaacctccggataataggagtagatgagactgaagattttcaacttaaagggccagcaaatatcttcaacaaaattatagaagaaaacttcccaaacctaaagaaagatgcccatgaacatacaagaagcctacagaactccaaatagactggaccagaaacgaaattcctcccgacacataataatcagaacgacaaatgcattaaataaagatagaatattaaaagcagtaagggaaaaaggtcaagtaacatataaaggcaagcctatcagaactacaccagaattttcacaagaaactatgaaagccagaaggtcctggacagatgttatacagaccctaagagaacacaaattccagcccaggctactatatccagccaaactttcaattaccgtagatggagaaaccaaagtattccacgacagaacaaaattcacacattatctttccacaaatccagcccttcaaaggataataaagaaaaaaaaaaaaacaatacaaggacagaaaccacgtcctagaaaaatcaagaacgtaatccttcaacaaacaaaagaagacagccacaagaacagaatgccaactttaacaacaaaaacagtaggaagcaacaattacttttccttaatatctcaatatcaatggactcaactctccaataaaaagacatagactaacagactggctacacaaacaggacccaacattttgatgcttacaggaaacccatctcagggaaaaagacagacactacctcagaatgaaaggctgaaaaacaattttccaagcaaatggtctgaagaaacaagctggagtagccattctaacatctaataaaatcgacttcctacccaaggtcatcaaaaaagacaaggagggaaacttcatactcatcaaaggtaaaatcttccaagaggaactctcaattctgaatatctatgctccaaatacgagggcagccacattcattaaagaaactttagtaaagctcaaagcacacattgcacctcacacaataatagtgggagacttcaacacaccactttcactaaaggacagatcatggaaacagaaactaaacagggaaacagggaaactaacagaagttatgaaacaaatggatctaacagatatctacagaacattttatcctaaaacaaaaggatataccttcttctaagcacctcatggtaccttctaaaaattgaccacgtaattggtcacaaaaaaagcctcaacagatacaaaaatattgaaattgttccatgcatcctattagatcaccatagactaaggctgatcttcaataacaaaataaataatagaaagccaacattcacgtggaaactgaacaacactcttctcaatgataacttggtcaaggaaggaataaagaaagaaattaaagactttttagagtttaatgaaaatgaagccacaacatacccaaacttaggggacacaatgaaagcatttctaagaggaaaactcatagctctgagtgcctccaaaaagaaactagagagagcacacactagcagcttgacaacacacataaaagctctagaacaaaaggaagcaaattcacccaagtggagtaaacagcagaaaataatcaaactcaggggcaaaatcaaccaagtggaaacaagaactattcaaagaatcaaccaaacaaggagctgcttcttttcgaaagtcaacaagataaataaacccttagccagactcactagagggcacagagacaaaatcctaattaacaaaatcagaaatgaaaagggagacataacaacagatcctgaagaactccaaaacaccctcagatccttctacaaaaggctatactcaacaaaactggagaacctggatgaaatgaataagtttctagacagatactaggtaccaagttaaatcaagatcaagttaatgatcaaaacagtcccatatcccctaaagaaatagaagcagtcattaatagtctcccaaccaaaaaaagcccaggaccagatgggtttagtgcagagttctctcagaccttcaaagaagatgtaaccccagttcttcacaaactattccacaaaataggagcagaaggtactctacccaactcattctatgacgccacaattactctgatacctaaaccacaaaaagacccaacaaagatagagaacttcagaccaatttcccttatgagtattgatgcaaaaatcgtcaataaaattcttgttaaccgaatccaagaacacatcaaaacaatcatccatcctgaccaagtaggtttaattccagggatgcagggattgtttaatatatggaaatccatcaacgtaatccattatataaacaaacgcaaacacaaaaacctcatgatcatctcgttagatgcggagaaagcatttgacaaaatacaacacccattcatgataaaagtcttggaaagatcaggaattcaaggcccatacctaaacatgataaaagcaatctacagcaaaccagtagccaacatcaaaataaatggtgagaagctggaagcaatcccactaaaatctgggacgagacaaggctgcccactttctccctacctattcaacattgtacttgaagtcctagccagagcaattcccaacaaaaggcgataaaagggagacaaattggaaaggaagaagtcaaaatatcactttttgcagatgatatgatagtatatataagtgaccctaaaaattccaccagagaattcctaaacctgataaacagcttcaatgaagtagctggatataaaattaactcaaacaagtcaatggcctttctctacacaaaggataaacaggctgaaaaataaattagggaaacgacacccttatcaatagtcacaaataatataaaataccttggcgtgactctaactaaggaagtgaaagatctgtttgataagaacttcaagtctctgaagaaagaaattaaagaagatctcagaagatggaaagatctcccatgctcatggattggcaagatcaatatagtaaaaatggctatcttgccaaaagcaatctacagattcaatgcaatccccatcaaaattccaactcaattcttcaacgaattagaaagagcaatctgcaaattcatctggaataacaaaaaaacctaggatagcaaaaactctgctcaaggataaaaaaaaacctctggtggaatcaccatgcctgacctaaagctgtactacagagcaattgtgataaaaactgcatggtactggtatagcaacagacaagtagaccaaaggaatagaattgaagacccagaaatgaacccacacacctatggtcacttgatctttgacaagggagctaaaaccatccagggggaaaaagacagcattttcaacaaatggtgctggcacaactggttgttatcatgtagaagaatgcgaattgatccattcctatctccttgtactaaggtcaaatctaagtggattaaggaactccacataaaaccagagacactgaaacttatagaggagaaagtaggggaaagcctcgaagatatgggtacagggggaaaattcctgaatagaacagcaatggcttgtgctgtaagattgagaatcaacaaatgggacctcataaaattgcaaagcttctgcaaggcaaaagacaccatcactaagataaaaaggccaccaacagattgggaaaggatctttacctatcctaaatcagataggggactaatatccaatatatataaagaactcaagaaggtggactccagaagatcaaataactccattaaaaaatggggctcagagctaaataaagaattctcacctgaggaatacaaaattgctgagaagcacctgaaaaaatgttcaacatccttaatcatcagggaattgcaaatcaaaacaaccctgagattccaactcacaccagtcagaatggctaagatcaaaagttcaggtgacaacagatgctggcgaggatgtggagaaagaggaacactcctccattgttggtgggattgcaagcttgtacaaacactctggaaatcagtctggcagttcctcagaaaattggacatagtactactggaggatccagcaatacctctcctgggcatatatccagaagatgttccaaccggtaagaaggacacatgctccactatgttcatagcagccttatttataatagccagaagctggaaagaacccagatgcccctcaacagaggaatggatacagaaaatgtggtacacttacacaatggagtactactcagctattaaaaagaatgaatttatgaaattcctaggcaaatggatggacctggagggcatcatcctgagtgaggtaacccaaacacaaaagtactcacacaatatgtactcattgataagtggatattatcccagaaacttagaatacccaagatataagatacaatttgctaaacacatgaaactcaagaacaaagaccaaagtgtggacactttgccccttcttagaattgggaacaaaacacccatggaaggagttacagagacaaagtttggagctgagacaaaaggatagaccatatagagactgccatatccggggatccatcccataatcagcttccaaatgctgacaccattgcatacactagcaagattttgctgaaaggaccctgatagagctgtctcttgtgaggctatgccggggtctagcaaacacagaagtggatgctcacagtcagctattggatggatcacagggcccccaacggaggagctagagaaagtacccaaggagctaagggatctgcaaccctataggtggaacaacaatatgaactacccagtaccccggagctcttgtctctagctgcatatgtatcagaagatggcctagtcagccatcagtggaaagagaggctcattggttgtgcaaactttatatgcctcagtacaggcgaaacaccagggccaagtagtgggagtgggtaggggagggtgtgggggacttttgggatagcattggaaatgtaaatgaaataaatacctaataataaataaataaataagtaaataaataaataaataaataaataataaaaaattaaaaaatatttaggtgcttaacagcctcgctcaaggtcataaaacaaagcctcagaagctaggaaagggaggcatccccatgcaactgcaaagtaaaatcatgtcaggggagctgacagaatttacacaggtggccagannnnnnnnnnnnnnnnnnnngtggccagacctttacagattccacttggagaagatggagatcggtcacaccataagccacgacttggaagcgggaagtgggccttgacctttcaacccagcaacagggaagagactgagcatgctcatcatgcctgtttttggagaaactggagactctagtctaaggatacaagctagctcacgcttgcagggcataagttagtttattctcatcagcacggctcaggttagcgcaatacacaggctgaagcctttggctataggaatatagatgacagttagggaactttactgaggtttgtttgtttttggtattttgaatcatctcatttattgttattttttatttttgagattgtcttttaagtacatgtctccctttcttttcctccctctgaggcttcccacatacacctccccacccccacccccaactctttttcaaactcatggcctcttttgaactgagttttaacattgaaatgatttttcttgcagtgtgcctgaaatgaaacttccatgcttgttttccatgaaatcagcatgatttttccacgaagggagtatttattatttttttgacacgaagcaaaggttagaatccaggcgtgtgtctgcatccacaacatgacgatgtgtgcacatgttttaatttccaaagtcagggtcaagaggcaggttataacaaatatgcagttatggcaaccagtcaagctgcccactccagtacagaaatgttaaaaacggacagttcactgagaaaatgtttgctcaactacatttaaaaataatttacaagttatttgtaaaaattaaacacttttccatgaagaaataattccttaaatgaaatcaaaggtcagggcaggtggcttggaggctaagagtctttactgctcttggaggggatgaggttctcagtacccagaagagacacctcacatccacctgcaactacagctctagggaatctgatgccttcggcaggcaactgaactcaagtgcataactaaacctaaatctgttaaaaaaggaaataaacagaggtctgggtgtatgtgtgtgtatgtgagtgtgtgtgtgtgtgtgtgtgtgtgtgtgtgtgtgtgtgtgtgtgtgttactttcataatcggggacagaggcagatttggacagcagggtcaagacaaccattcagactgttacttcagttcttcgagaaggaaagtcactagcaaaatgtcaagcaagtaagttcaagagtaaatatttaccaattaattgtgaaaagccaaaaagcctattctaaaggtatagaatctttctccacgtgtaacaactggaaactttgccacacacaactaagtttgactaaatgtctgggactatttctcacaagcacatgttcatttctgcccatgcctcctaggtccttagaaattgattgccaattaataataataacaacaacaacaataataatagctcagccaaacaggcagatgaaaggctcaagaataaatttgtatttcgttgaaatgcttcaacgacagatttagagaaaactactagattaaagaagccccgctttggaacactcactggcggaggagagttattccggacacagtttaaggaaacatgtctatgactgtgatttcctgtgtcataacccaaacaccagatttcttcattgctttcctgtgtctcagaaaagtgacctagaacagtcacggtgatccgtcttgggttattaatgacataagggcatgtttacaaaagtgattttcagcttaaactgagggaggtaacgctatttaaatgatgttgagggagagagctgagaactatgattaaactctgcagatgggaatacaccatgagatcgctagggacactgcagaaaatccagggagggcttggcttgtatgaagtgtggaaaggtgtctgtctgtcctaccccgctaaggaccaggctggcagatagttggaaggatcttctttaaatagcgcctgctgttcctgccgtggccttgccactgagcgcagcatcagatcaagagcacagtaacttaggcaagagggccttccttatgccttcttctcaaaagttttcaaaactccgaaagatggaggctgcttctctttgtgggagtgtattctatttcatggctggcatggccctaagtttcttcaggtagagtttaggtggtggccagagaacactagttgggagtagcttcattaaaaataggtagtgttttgggggtttgtttgtttgtttgtttgtttaattagtgtactgcaggttgcaaacatgttttcccataatcagatgtcacgatggaattcagaatcaatcactgagaagtgaacgggggtgagggtcatgggtgagggaggggcagggttggggagaagttggactgggcagaggaagatgctgagacacaacatagacaacaaactacaaattcaaacatgtccacagaatatttctggagcaagagttagccatcagagtgactacatgggtccaaatggtaactcacacagccccaagaaagctgatagagatggctcattggtgccaactggttgggccattttgcccacttgctgcacttgggcagcgagtggtctctgatggctttaacacagggcacacacacatacgcataaacaacctttgtgttcatctcctggctgacagaaaagacgtcattttcagtagttataagagtcccttaaatgctgtatatttagcctgtgagacaatcaccgacgaattctgatattatacacagtacatagaataccatctgaaaacaatgtttacaattaagaatgaaaagcacgcgtgcagaatcaacaccatagaagcagcttggaagcatgttaattctccaggtccactctgtagcctgagagtgggtctgaaccaacactcctagggaaaagcgatctatgcacagcgggtggcactcacataaataacaatgatctttgactcattgccttcaattagatggtaagcttcctaaaggtagggctatttattatttatttgacacttctacagatctaaacataggaaaacactcattaaacatttattgagtcaaaccaattgccttcacgaaactgataaaaaaaaaaacatcattttagtatctatgtgagtgcaactggaatttataaacactttacatttccaaggcgctttagctgcaatgaagacgatccataaattttctgctacataaatctcgaggataattttaacaatggtgagatttctccactatgttctcagaatactgaagaaagctatttaaactgcttcaggttaattaccacatagctcagaaagttctagagcttagaaaagaatgtacagccaaacccttgcacacagcatccttccagtcataataataataataataataataataataataataataatagatgtatatttcatccataactctcttcaaacagaacaggttgttttcacaatccaggcatctaaaagccgagcaaaatgggaatattttcctcgttattctgttattttctccatgtcctgcaatgtgcctttttgttaaacaagaacattttgatttttcagatgatcagaatgactcaatttaaaagtaataataataatgataacctaagataattttgagcggctaagcaatgataatgtaaaagatccctgtggaagaaataaagatggtcgaactgaacgctgatacaggaacaattccccctgctccgcgttcatctgtccatatgaactatttaagtcacggtgtaattatggaaaacattaatagcaggcaggcaaagtgttttgtcaatgcctgcacacatcatttacattggtatctgttacaggctcacatctagattttattgctagagccccgaaatcaatgtgtcccccaacatcagtgtcttttagattatgtggtactaggaccaaacagtttttgaactctctttgttccaagactattttgactgtctttaaaaaaatatgagttgcctttcagatgctttaaaactcttcctttatggtatccttcatccctttctacactgaaaaccttttggtgtgttactgtcttttctgggttttcttgtttgtttttgctttaaatatacaatgttagttctggcctgtgtttatgtacatgtcctcaatacctggcatgccaattttcagatgtttgaccacaaaattttctttcctggacatacggacagtaccagagtcggcctgtcagaattacaaagcagtgtcctgtgtcaccagacaatggcagctccccggggagagctatagcaatagtgtctagcatcataagtaagaccacttgcaaaccccttctcaactcataaaaggaaataatagctccaaattcctatcacatctttaaagaaaaaccacaacaggtttgagccctggggattatgaggggagggatttggacaacgctaggttcttgtgtttacacagctaacctgatgacatcttcttcagaaagtggattttcaggagacttagctaagtttcatctgcacaactgtcaggggcctgcacccatgctgctttcttggccccagccaacccacagacattagagcattcagcagcagtcctgagactcaagaggccagagtcggggatgctgaagccaatgtcctccctcttttcttcttttcttcctcttcctggagactggaccaagtgaacagagaaaatgaatgggtgtgtgtatcttaaggcaggcttttgactgaccacagctttgaagtgcagttccatatgggcaaaagtggggaaataaataaacacataaagaatagtgaggggctttgtctataaagagaaaggagtcctaaatgtggacaaagagaataaaccatggagtgttgatgtcattggtataaactagaaaatgttaagatgagagtccatagagactactctatgagattgatgatacacacattggtagacattagatcaacagtagatacacaacagttggtagatagttgacaaataggtagataggtagataacagatgtgtgggtagaacaatgatagatggtatatggaggacaaatgataaatagactatgatagatatataagtatctagatagatagatagatagatagatagatagatagatagatagatagatgatagataaagaaatggctttatgatacatgatgtatagatgatagatagatgatggatagatagatagatagatagatgataggtagatagatagatagatagatagatagatagatagatagatagatgatagatggatagatggatagatagataaatgataaatagatggatagatagatctatgattaatagatgacagattagatagagatagatggatagatagatggatgatggatatataggcagacagacagatagatagaaaaaaactaggacatatctccatgtttgtcctctgctaaggtacagaagaataacacttctgtgaaacagcattcttatgtgtcaagctttttctggaagccctgacactctacacagtagatgaaccttaaagacattgtgctaagtgaagtaaaccaatcgcagcagagcactctcttccatggaaaagttgcttctctcagtttttttttaaatcagaacaaccagaaagtaactaagacattgccacaataaaataagcacatttcacacctagcccttgacttgtaaatgccagacaaaaagcaaccaatgtcaccttttccaactaataaaaataaatggtacaaatgacttgaactctgaggcacagcagggaggatagcactagcctgccgcttgtccaccttgttggttgttcagaacattagatatgattttgacaagatagttaccaagaaagaaaagaagcaaattaaaaacattgaccaaaatgcaatatgagatttttttaagtcccaagttcagcgtcttgggtacatggggaagttgatgtcagtcattgagggggtggactgaggagtcctagttacaaaggcatggcgatgccattcccttcccctgaagaaggagccatgttgcaagcaaagcaataattgtcccctcaaacttctgattgtattcttccagcgatggcgcttaagaaatgaagtgctttggttgcactacaatttgattttattttgattttccccacttgggaaaaaaaccaactcctttactttggggggcgtcacaaaagatgaaggaaatccagaggactgtgtttccacatgtcacaagtacctgcacagggctgttcagtccacctctgatcacagttgctaaggtatggaaccaacccagttgctcagcagtaggggagataaaccaagctgtgtatacacgatggaatttcattcacccaaaaggaaagcggaattacatcgtttgcacaaagatggatgagctggggatggacttagtatcatggtattacgggagttaagccagaatcagtaagacaaatatgtcttcccattatgggtcctagattttacattgatacataaatcatatatgtgtacatgacgtaagaggagatgtgtcactgtctaaggggatgaaaaggaccagggatatggtcaaaatacattgtgtgcttgcattaaatgtccttatgaaatactttactaaggataatgaatatatgccatttaaaaaaaaaaaaaggaaaatacagaagaggaaagttactgatggcattgctggcagccaactctgatgctacaatcctgacctgccaagcaagatatgtccacttgtgcaatagtggtgtggaggttagcaggtaaccagccactgagggtttggactcgaagcctgcttgacaagaaggaatttcataccttgtcatgtaaacatgatctaaacttatggtttggaaggtcaaaggcccagagaggaggggatgctatttcagcatgtgtgtcaaatgcacatgctgtcaagctgccttctaagtatgtatgcttttagttgtagattagtgtagcccttaggcttagtggtacgccaagcacacacacaaacacacacacacatacgaataataatgataaaagttttgaaaagaaaagaaaaagggataaagggagggaaatggcaaaacaaaataaaatgtcatcaataagacatttttgtgtgcaggaaatattttgatatcacacaatgatatgaaatctagtggaagctgactcagaagttgagttagtttgacttcctgatgtcaagacatttcataacaatgactctcttaagattttaaagaaagaacttgtctcatgaagtttctgatgaactggattctgggtaaaggggaggaggcatcagtcagtgatagaacacttcccaacccccagcattgcacaataataaaatattatagaatataaactagaataaacctacaataaaaaatccaaagaaaactggctaagtgtggttaaattattaaagtatctgactacataaaagttgccaaatttacagaacagtgttttaaataatatgatgtgtaagcacttacctaagttgtcttgtatttttaaatctaccttctgaattatttattgacataaaggtctatcagtaggagctaaaaagaaaagatattaaatttagtcactgtggctcaattccctgggaaaacagtgaagtagcattttaattaccagcaaatttaatgttaccaaccaggtgtgaaccattggaaagtccaccagcctctctacctaagcaagtgttttcatgagtatgatatttttaattttttaaaaaattatttattatatgtatgatatctctgtgtataaaatatatgtgtgtttatgtgtgtggggcatgtctgtatgtgtttgagtttgtgtatagtatagtgtgtgtatatactttgtgtgtgaatgtacttttgtatgtgtgtatatgtgtgtgtacactttgtgtatatgaatgtatttttgtatgtgttttcctgtgtgtatgtacactttgtgtgtatgaatgtatctttatgtgtctctctctgtgtatattgtatgtgtgtgtatatctcctgtgtaaatgtgagtgttttttgtatgtgtgttcatgtgcttgtgagtgtgtgtgtgtgtgtgtgtgtgtgtgtgtgtgtgtgtgtgtgtgtgtgtgtttaggtcagaggacaactttcaggagtcaattccatccaacgcatgttctggggttgaattcagggttgtgcatggcaagggcttttccccactgagatatttctgcaggctcgcttgtatgaaatcttgacagcatcagtttctaataaggaatgcagaccccgaaagctgtcccatttatactgcacttatgttattttgtttcaactacaaattcctagactatcaaagctaccaacatttgactgtaaggcagttacatcctaccacagaggttctcaaaatacccaaggcccctcctccgcttcctctccattgttaggattagtccacatgacatttctttgagcaaaatccataatgagatgaatagttttcttactggaaatgtgtatgttatataaacagttattggaaccatataatctatatcgatatccaccaggcctggtccttctcagatttaatgaagctgtccattcagtgtggctgtcttgagcttacaaggctctgtttgtcttcagaataaggccaggctcacaaagacacatggcaactgccaagatcataattacttttatattgatttaaatctagtaaaatattaacatttcttatctcttagaggatggtttgagaatatactaccaaaatgtgagttataaaaaggctcattttttaagtctgtaatttgggccaaatatctaccacaaacattgtagtgtatgtttccagaatctttatgtcttagagagagccattcaacaatttatattttgattctgttcctatatttgctaagattgatttacctatctaccacctagttagctaaacatgccattataagtaatatatatcatttgaaaataatgtgatctatgcaaacaacgtataaacacatcctaattataagtaataagtgcacttttgtgatgtctccaggtttgattaattagcttgttctaacatataccagccattttaaagcatgctgtagctttgacctgtttagcttttgcttcatttaaagcatgcagctcacccattttactgtgttttaagataaaatgtacaaagaccacatgcctcccaaagaaagattaaattacttccagtcgttttaaaccgatagacaaaagcaaactcacatgaaacctatcatcctgagttttgacaacatagaattttccagttcagggaatacacactctatctgagacacttcatcaaaacagggataaaggccggaagggcctcagcagctgcagcttgcagcagagtcgcactatggcgccctcctgtggaggtttgctcaaagattcatctgcctgcccttgggaaagattttccccccatcagcaaaaaatcaaggcattcagaattaaggaaattctatctggttgagtcattccttccatttgtaactgggctttgagctgcttttcaaatccaaaaaccatttacggtaccgaggatttgcagatcaacatacacagaagggagtgaagcttctcatctttatgtcttaattatttcattgaagtagctatcccccttgattttaacttaattaagagctaaagggggcaaccagaaaactcaggccctgaagcaggaagataaattcttcagtaaagacatattttttttagatttgttcagttaaaaccggttttgtgttagaagcataaagactatagatttgtaatcataacaaagaaagaacagtgaagtttaatttgattagattgtgtatttatttatatttattaaatatatgcaaatggtgaccattagattttcaaaccattaaatttttagctccacttggaaacttacctttttcacccagaataaatcaatgtcatttattagatgtctgtcccaaaatgatgggtcatttatattttctcaccaaaactgatcctcctcctatgctcgatattctgggtatagaaatgtgatctatgttgtatgagacatatacacacaaagacattcacatgtgccccaatatctctgcacttttgaaacaaatttctgaatagatctcagtctgtgccggatcccccacctgatgcactaagcctatctttcctgctgcatcttctcttgtcctgcttccctgtggaaccttttcaaagttattaatgctgaagacctctactaactactcaaaactcaaggcttaccctctcccccatagaagttaggaaccaccagagcatggttgggtcaccgccaaccataaaattattttcattgatacttcataactgtaattttgctactgttatgaattgtaatgtaaatatctgatatgcagactaacttaggccaccccctgggaatccccaaaggggtcgcgacccacaggttgagagccaccttggatctctttaaggagggggattgactgaagggagctcagagaaaaacaagaaagctatccgcagcatttgactttacaatacaatggatttttttttttttttggtctctgcatgtaaatctctttaaatctgtctcctgcaaatggaaatgggaaaacacgggatttttaaagcctaaatgtctgtaattacagactattaggtgactgccgcgctcataacttgagaagtgagctcagctctgtctgaagccttagccataatcaggagattataagtgagcacatccacactacacgtgtagaacaaaaatcttcaaaacaaaaatagcatgagaaagtgtgtggcggagttggggacagtgtcagcttccttcagtaaaaaaataccttaattagtaggaccagattagattagaagcataattgagaaattcaacctacccaaagagtcaccaaattggggggggtggggggggaaatctcagaaaaagaaggttggcaggttggggagtggcagggagggtatgttcaattataatacacactgtatgaagatattgctgtataacccagtgctgtatacattgaatatatgcaatgaaacttaaaataaataaacattaggctaaataatctcagtgccaggcatctttttgccttctgggtttaaaaataaaaattctaggagctggagagctggctcagcagttaaaagcattgactattcttccagaggccctgagttcatagcaaccatctgtaatggaatccaatgtcctcttctgatgtgcctgaagacagctacagtgtactcatattcataaaataaatgattcttttaataaataagtaattctagaaaaatgagattagccatcaagaaacaagggtgatatccaaactacttaaaacagaccagacttaaaataaataagataaaattgggtcacagttagacgatgtccctcaaatagatccagaatgaacctcatggcaccccgtatttcagggcgtgccctctccagaaagctaagtagcatcagagagatggtaacctttctggtccccaggataataatgcaatccctgtcaattagtttggacaaggggaatcattaagactgggtaactgcgatccttaaatacagagtctacgttccccaccaagagacttcaggcaggccagtctcagggaaccgcaagctctgattcggatagccctcctctccccttgtctccacagcacccttatggagtatcccattgtcccagaggtggcctgtccaaaaagcaaaagccttccttccatagcacaagattcagctgggaattttaatgttgttttagcactacagtcccttggggagaaaaaattgtttattcccaaatgactcttctctctgtgtttcctgtctcgtgagctagaataactcctgagtgaaggagtaaggaaagcagaagagagaaaaagaagatgcgggagggaaggcagagttctgacttgagttgggaagcgctttccctgaagatttgtgaagtgcagagggtccctgtgttgtctgcaaaacctggtcattggaatgaaccacgatgtggagctcgatgaaaaagaaaatattgacacatgttccagcacttcctgtaggcagcggcttaacacccttagcttctggccaaaaagcagtcagttaactatatctaagttgtaatttgctgtaactggatgtaattggctaaagtaagtcctcctaacggtccctcctctggtgatgtaggaatataggcactacggcttattatttcgcagctggggacataaaggacagacaagatctgatgatggagtctaggtatcatctctcagcatccatttcttgctctcttagccacaaaagactgttaatagcgagaacagtaagggaaactgaggtcacgtgacctgacagtctttataatcaactttagggtggtttgttattgctgtttgtggggagggcatggatgggacacacagtctctagcaaaccccaggaattcctgtcttcatggccaccctgtgtgtgtgacagacagatgaggcctttttctggcttttatgcgattgctagaatctgaactcagaccttcatgtctgcacagaaatcactcttaccttctgagccatttcttaggtttccatagctttcaatattttatgattttaaatttttgattagcgggtcagaatcaaaacaggaattatatgttctcctccctcaaaaatttttttctgagacatttattaaaccctggctatgatcgccagcatccctctaccaccaccaaaaaagatattttgtattaccctatcaaaagaattatcctaacatatgctatattagatcttaacaacaacactgaaaaataaattatgtagtagtttaaaccttcatacaaattatatacagtatgacactattaatttaaatccaaatcattttcaatttcaggtaatcagtctgactgagagataataaaaccagatctataaaacaataaagacacttacaattttgatattattacttagagcagtttatcttcagggtatggaaaaacaaactatcatatgtagcatgtatgcgagctcgcacacacacacacacacacacacacatgccccaggacctctgctctctgatcacactttcttatgttcttaataaggtggaatttgaatttggcaacatttgctgtttatatgcaaatggacattgctaattataagtggtgtttctttctgttctgcctgctaagtcattaaggtagccccagaatatttacttgtatttacgctttattagtaattacagttactctagcaatcttttctaacagaggttccgggggaaacagagtcctacaggaaatgggtatccattttgaattctttgaaggatagcatgtataaatggacggcagatccatgggagagaggttaattcatgacaatcagtgtgtacttcggttttgcaaaatcttgcttgaggctgatattcgtcccccttgaaaatttacactgtctatggggaaaacatccgacaatccagactgtcatcaaatcacaaagggctttccaggccaactcacctaaataaatctattcggtaggtctaaaagtaaccttagttcttaggaaaagtgacttcattttaaaattctgtctatcataagagcccactgatctacatgtaactgacggcaatttagcttgtagattgtgagagtgagactgttataaaaggagtattttgaggaacgtaacttggctgtggtgcacacagcattttgaagtgaaagcctttagggacagagagactaattaggaagatacaaaaggaggaattaccaaacttgcttaggatgtggcgataaaaatgagaaggggggagggacaactattatactgtaaagaaatttttatggcaaagttaacaaccacttggatgtgaaatgctaggggcagtggttttcaacctgagggtcgtgacccttttgggggtcaaatgatcctttcacgggggtaacctaagatgatcaaaaatgtcagatgtttacattatggttcataattagcaaaattatagtgatgaaatagcaacaaagtaactttatggttgggggtcaccacaacgtgaggagctgtatgaatgggtcgcagtatcaggaaggttgagaaccgcaattctggggcatcaagacgaattaaagtcggtgcagttctgaggaagagtccggaagagtaattacgtaacagtatgattgtaccgtcaacgtaattagtaaatctgtgtttttcataacgctgagaaaagttgagatgatgaagttagtgtttgctgcatcaaactcttcacacagtgacgacagtacatcaacatggcatactgccaagggtgagaggtaacaggctggaggagcgcaggaaatggctatcgattcccctgggtggcaggacactcccacgctaaactcttcacagccaacgttgtacaggttcctccttaccacctgcccactgtgacattgtctaccgcccgctgtgacatcactgcaaaaaggtgccaggttcaagtccaaggtcaccccccacagtgtgactgtatcatttgtggccaggctctggccacgcatgagcagagcgggagaaaaaggggcgggggaggcatgaaactagaagtgaggcttgtggaaaattcttccaagcatcagctgcgtgaaaagctagtcaaatcttgccatgagctaaatgacattttaagaactctaaaatatattttttgaagactcagaatgaaaagaaaaaaacaaagtgcaaatgaaatgcaaacatttgattcaatacattttgaatataccatctcgactgtaatttggacagactcttggaatgttttagttcaacaagtgagaaacgatgtcttctgacttggatctccttgcaaggcatcttttgtcatccgaaaattggtttattaaaagagagagagagagagagagagagagagagagagagagagagagagagagagagagagagagagagaaatcaacttataatgaaagaggaagcaagaataatataaatcatcagaagttgttccaacagcgaaaactaaagtgtgattttcccccaaaactcttatgatgggaagagcagtaagagatgctcagaagaggacagtgggcagccttctccatctatttaacgtcattagcagagaagagtagctcgcaaggcagctctgaagaagccattcaactttcttacgtcttagtgaaaagaatcctactatccatggggatcgcttgacatgcatggcgtgcccgcacaaaagggcatcggcacaaaattggataatggctgccattcactcaagaatacagaacatctcaaattgcccctcacataaaagaaactgatcggaacccccaatctgtggcccacatctgaaggcagctcactaatgcccgctgatatttttgcatccatcctaaatgcactggtaattaccaatgagaacttccgaggctgtgatgtccctaagccatcagtgatttaaaatgctcctgttagccaaggtagaggaaagatggaatgttttgtctattgggaaatatttcaatactgccgagtatgattggggtctgaagctaaaaacctgcagaaatgtagtattagatgtagataaagtcattgacatgtttagtgaaattcacagtttgatatttttaaggtttgttaggtttataataatgtaagtcatcattgaaccagcgtccaaagaacacacacccaggccccccacacatacacagcagatgtgcagcttggtcttcatgtgggtccagaacaactagagctggggccgtcccaaaagctgttgcctgtaagtgagatatgtccttctagctgggctgccttgtctggcctcaatgggagaggaagtgcctagcctcacagagacttgatgtgccagggtggggaagaatacccagggggtccccacatgctcaaaggaaaggggaggggtttgggggaaagaattatgggaggagaaaggcactgagtaggatgtaaagtgaataagtaaatgtataataaaaaaaaatggacttaaaaaaaaaacatgaagacacagcatgctgtgaaccaaactgtgtctacctaaaacatacatgttcaagtcctgaaaacaataaaataaagtttaactcatcaattctttcattactctgtgtactcagatttgtaaattttacacactgcagcttgaataaaggtcttccaagagtctaaatgccaaagggttttttgtgtttttgtccctggaatgctgttactaggatttagtgaatccttcaggaagaaggggtctgtggaagattcttctggaggaggggagctaatgggagatcattcagtcagcaagggcacgccctggattgggtctgtgtgatcttggttcctttgtctttctatctttgtacctggccaagaggtgaataactctccacccccgtgatgtgatgagccagctcactttattacaggcctgtggcagtggtgccaccggtcaatcatggaccagaaccttcacaccagcgatctgaaataaacatgcagacacatgcacctatgcacacacacaaggacacaggcacacataaatatatatacccacccacacacaaacacacaccacatatacacacaggcacacacacatatactcacatgtatgtatacacacatacacacatgtacatacatatacacatatgctcatttgcacatgcacacacacacatatacacatggacactcacacaaacacatacacacatttacacaccgacataccactcactcttgtgtatatttctatgacaatcttgctgtgggcccagcacaggctgctcttgggtgtttctgtccatgggtaagtgaggaaactcagaaaaccaaatgtcaccttcatgacagctgtgatttgggtgtctcggaacagagtggaggcatgaaaggttgaaaagcagttgttttcttagatatagtccgacgcagctctagaaggactccctgctcagctggtgcaaaggagaagcaaaaggagggaacaaaggagcttccaggagttcagtttgacaactggatggatatcaacactatgacctggagcaatgggatggacatgctaacggaagcaaagcaggttgctttgtcacgtgtccccctccgccttgcctcacatcccacagtgcttgcccagagtacaccagagtccacactgtgtttgaccgtaaacacaatgagggcacgaacagactgttcctcacttactacgcacaggatttacttacagttgaaattaagcccatgtatgtagcccaacgacatacaagatgctctactgaaactaaattctaacatccttagtagaaaaattagaatggacaggaggccaggttgaggataaagacagaattagagccttttctatctcccattatctgggggccttggaacagcagcatagcttctccaagcctcttagtatgcatttgagaatgagaacgaacacacatttaggattatcataaggttaataaaaaaaaaggcaacaaaaacacattcgagatttttatcaagatgtccagcatgcactggaacgtaataaaccccagcaagcacaggtgtttggtcccctgtccagaacatctaatgccttcagcgcggacaccacagaatcggcgtagtggaaagtgagaggtgagagaagacatattttgagcataggaacatatcttaaataatttcaggacaagataataggtttcttcactcttgcagccctaaagggagaggggggaaggggactgaaaggcactgtggcaaaaatagaatgaatttacccaattctttactgcactatttaacctctgctttcttaatcatatgcacagcaggggaaaggatgtgctaaaacaattcatgtgtcatgaacaaagcagccgcagattttagctcaaaaatcacactaggaaaaccaccagttggaagcaaagtaataaggccaaatttattttcttaattgagccttgagttgcaagcaaccctttaattacattaatcaagaggcttcctcgcagcaaataatgaaggaaatgcattgttcgaacttttgctagattcattcctaaaaattgctggatattattcaaacatatggaaaatagggcccttggtttatttttcttcttcttctttttttttttttttttgcctctatcttttcatcatagccataacaaaagacaagcacgcgctcacttctagacacatctgtaagtcgcatttgaaacattgaaaacatttacattttcgtgttcttaaaaatgttagcggaccttgactgggctaaattactttgttgttgttaaaacctaacagcattttattttaaatatttcattgttctaattttggaactttggatgcatttccaagaaattgcttccactgcctatatgactgtcaacctgaagacggctcacctgtgtaagaggtgaaaaacccaaggctttgggaagagcaaatgagggggtcccaaaggtcacgtggctattagatatcaaagctgggccagaacccagggcaactggcttcatctctttgtaaactccatgtaaatctttgtgctctggaatgttctagtctttaaagtggcgttgcttccccagttgtccatcgtccaccctcttcaaccttgttggcactctcttaactccccctgactcatgcgtatcacctgctcactaagtgtcccagaatccttggctctcttccctcctctgctgaacagacacgcttctaagatactctccatacactttgcatagttatttctcttgtcatccttccctcactgcaaacccacacacggaactgtgacctctctgaaagtaagaacggtgcagttcattgctgagtcctagacctgtggtgcacagccaaagacacttgggaaaagacgcagtgaatgagaaactttgcttgagagaggaccttgccatgtagtccaggctaacctcagacttgcaatcctcctgtttcaaactcctcagtagttatattatggatacatgctgacatatatagtcataaataaatttgaaaaatatggaggtcctttttttctgcaaaaggagaaaatatataggaaacccttaagcaaatgctagagtttcacttaactttggaaggcactcaggacctacagtgatgggccaggggaacgtaaaaaatttaaaaccagttatttgaaatatgccctgaattgaaatgttcaaattttaccaccattgcaggaaacaataaaaaaagaatcatatttatattgctgtcattgacagtcacactttgagaatgtaataaaaatcaaattttatcataaagaccttaagcatgtacgttaaacattttctattttccagcctttaaaaactattgttgccatatcatttacatagcatacaaccaagcctgagaaatagagtgttgccttagaaacatcatcaagcaattcagaaacaatttctttgatcaactgttttataaacaaaactggtccaagagaggtattgtttcccaggtaaccacaagcatccttagttcaagatgaaatagagttattctgtgatagtaggcctgtgctatacctgcaaatcagccttctgcacagtagggggcactaaagagccagagccactgcctacaagacaggaggacccatcactctgctttaacagacctccacagcaagccttgatcacctgggagctcatgtgaaaaagtaaaaacttataaacacagcatgagtctaaggaagacaatagagatagataggctcaatatatcaaaaataaagttgggaacttacattttaagtaaattgtctatttggggctttttttgtctccctctgggattaatatctagtcctttgaaagtatagcaaccttacagtactatccctgtgtatatttagtcagtaatttattgtcaagatctgctgggaggaaggactaatcatatacatgtcagtagttacgagtatttggagtttaaaaaatatctagttaccaagtgtgttttccataatccatcaccattgctgctaagtataaacattttaagtaaaaataatctttgaccaatgcagtatttcttctgtcctctaaaatcaaaggaatatgtgtctgaaatgaacagttctacacaaacttctcaagagccaaatctattccgccatgtttttgattttctaagttgtttattgccattcatttctccggctttgggccaggggatagcaaaaagctgcctgacaaaggtgtcccccagacccatccatgccctgtccttccttgttctcttctgtggctgtccctaattggcacagtgctcccttgtcctttgcataaaaagtgaatagtctggtggccctcaactgcagcccttctgtgcagcataactgaccatccacagccttctaacaacactagacatctatactactccctaccctgtgaggacagaaatcttgcttatattatacctaatacatgacagatgcccagatcatatctaaatactacaccagaggcaaaactatatatagtatattgtagaacttactagcaagatcacaaagaacctagcactagcacatgtacaccacacacacatacacaaacatacacaaacacacacgtgcacacacacaaagaaaaataaaagcagaagtgggaaaaagttggaagggatacaacagggccagggagatgcctcgatggttaagaatcaatcgtggggactggaatttggatcctagaagctgcaatgcaccactcataagttcctataagtccatctccaagggatctgatcccctcttctggcctctttgggcattgcactcatgtgtgctcatacacacacacagacacccacatatgcaaacacagataaaagaaatcctaaaaataaaaacgtggaagccgtgggcacagtctgttagtggatgctctaaagaccgctcaaacaccatctgaagtgcgcatgcgtaagatcaaaaccaggacacaataccttggcaaagctacagagagaaatctacagaatccaggcctgtgttccacacctcactctcagcaatgttaacccatcatttctatcatttctacatttcactcctgtttaataatcatagcagaaagtataatagtaaagccttgcttatcaaagagatttgtcttgttagtgcactaaggccattggagctttatgaagcacaatttgcactctctttggtgatctaaaagcgataactacaggtgtgattcactgccatctagttctagttaataaactaactcatgagttttccatttcttagagaagcaacttggttaagcccttcctactgcttctaactggggtcatatgaactacaattgcgtgccttctgtgccggaaaacaattgtaatctatcatggctggtactgggtccatggattagctgtttacagtgtcagacagtgaattaaagctttgttgtagaccagcttgcaacacaattatttcccgttcacaccctataaatcaggcaacctgaaacttccacacagcaagcaaagcacctaggttttgtattaattgtgctgtgtggtacggtacctggctaacaatatggtaacagtattctgttactgctgcccataagcttgaaaaataaatttccctgtcactagaacctatttaagggatagtcggcgttctcacccactccctcccgccgtggagctcttccgtatttatgttgaaataataggaaatgaatctaaatagaaacacttctcatatcttatctctctacaaacaacaacaagcaaaccatattttacaataaattatcacggcagttgttggtgcgaccagctttgctttgtgatctcacacctaagctggagagatggtacttcagagaaggtaatctgtagaaggtacctctggaggtgatgaaacctgacagatgctgggggaatggtggagttcagcggcacaccagcagacaccttagaaaattcttgttaaaataataaagcgtcttacctagtgatagaaaaaaaaatggccctgctaaaagaacagatcttttacaatgttatacccttatgtatatgatcccagagggaaattattcaccaataagcaagtagacgaaccacttgctgcatagactgtacagaagagtggtgatttaggaatgtagaatattgtcttcccaatgtccttctttacacatcgccatcacacccaatgtgggtaaaggcgtgctacacacagaagctaaagaaacggagtgtgtcttttcataacatactgagaggctccctgctccccaaaacacaccttcagcaccagatcctccaaaacctttccctttcctccccaggcagagatgctgatcaggtggctggtgtttacaataagactcacaatcacagatatgttaaggcttaattgcagactgtataattagattaacccaattaatgagatagcttggtttcacaatgcacgtttattatttcaatcgtttcttgtcctgatttcttatttctagcaggggagtcttgaaacagtggctctgtccctgtatggttttgagtaccgaggcaatgttagctttttccagatgcgtagaagcagcgtagcacacgataggctgttctctggtgttcttgcataattgtgagtgcctgatgcacagtgttgatttataaatatcagcaatttcctcaaatggagtaaactgacctggaccgtattccattgccatgctagcaaccctcagacctccaccgtgtccacacaagacggaaacccaggaagaaccttcaagggtcttccagactttctaagtcctcgctggagagcaagctccataatcctgaagtcacaggcacctgtcagcatatctttattttagcatatctcccatatagcacaagacaaccttcagaggaatctaatcatgagaagaatttttttaaaaaagaatgagcatcatccgatattcaaataaggaacagcctgagttcagggtgtggataccatactggggggtgggggagagtcttaatctgtcagagatgtcaggcaatggagacttattggccatgtgagctaacctggtgtgttcttaaatgtagttgttgtatagataccattactgtcccacaatcaatcacttgcgtgcacacatgcacacacaagtacatgtaactttttttttttttttggattttcgagagagggtttctctgtgtagccctggctgatatgtatctttttaaattttcctacgcacaaaacatggtccagctacatttcacatgctggcctaaatctcacttaaaactcatgggtgctggacagtcattgcatctccttcttataggctaccccagccctggatctagcggtgagcaggtactctccagctgctgctgtctgcccctcactcgtcactgtgacacctgtcatccgctgtgatgacacacagtccatagtgtcggatcgttaaatacagtctgtggagtgttacaatcttttctccattgggggttggaggggtgggagggtggtggtaatgatttgataagtgaaaatgggagtctgaaatccacaggacaaaatcagtaccacagttgccatgggacatctgatacaatgcaaggacaccccagagacctcagctaggagggcagcttggtgccaccctgggactccttgtgtaagaggcatggatcagacctggagttaggggccaggtggacaaggaaacttaccctcaacagaactaatatctcattcacccagctttgacttgaaaatcctatccagccattatcattatatatattccactgtcttcagtcccgagacactaggccatatttaattttaatcattaatatgtaaaagtaacttttgaaattcaccaaaaataatccttagtcaattttctgataaagtaaacttagctccccaccaccagcattcgatttagatggcctccagaaggtttgtttttgaaactaagtgttcatttaaaatattgaaatagattatgagcatattagagggcaggatgggagaggtcagctcagacaactatagccactcctgaaaaggtttttgaactgtctaggttactggctggttttccatattccgcttcctagagaagactgtgatcctggttaacaacaaaattaaacaacaacaacaataaaacaaacaaagattgcagtggcaaggactcgtaccaacggctaggagagcaaaatgcaccttccaatcgccgctggtgcccctctcctattacaccataaattagtcctgtgctcagacttaggaatagccccaatggtttttatatagtgccgtgtttaatagaaaactcaatcccccatgccttacttaggctcagagcttaatctggggacaagttctctttctgaatatacttgaaaactttctttttcagattctcagtgtgtgtgtgtgtgtgtgtgtgtgtgtgtgtgtgtgtgtgtgtttattcttctaagtttccatttcctcacccctaaactacagctcaagtattctagacaacctaaaaccagtgtagtgttggaattatcaaccaaggatcgcatagtaccgggtttactgtcaagcacgcgtggattcaagttctcacgggaactcaccatttgctacctgtgtaaccgtggctcaatcatctaacacctttgggttggggggggggggtggtttaaaaaaaataatgtcaccaaaacctctcgtcacagtgaagcataattccagggcatgtttgtaatgtgctttgtaaagcaggcccagccccgttgtcacacacaagtgcttttcctcctcaacgttgctttgccgagtggtaggtggcacatagtggatgataccccactgcacagctctactgcctacctttcatgggctaccaggcaggaggcgagaaatggaaaagcaatataaaatctgcgagtcgtggtccaggaagacggcatctccactgccctactgaaggtctctgaagctactggggtctacatgaagaagtgatggctattcaaaatttgagaatacgctgtctttagagtaactaccatgggggcctggggagatggctcaggcggtaatgtgcttgtcatgcaagcataaggaccagaattcagctttctagcagccgagtaggtatggtagccccactactaactctggtgcttggaggatggagacaagagaatcctggaaaggggctggtgatctgggctagcagactctgtgagctgagttcaaatgtgggaccctgcatcaggtagagagtgatcaaggaaaatacccaatgtcaatctcaggcctctccaggcatgttcacaaagacatgcacacacgcacacacacacacacacacacacacacacacacacacacacacacacacctgtttgtccactcacatgcaaatacacgtgcacatgtgtatacacctcacacatatacaggcaacaagcaaaaacaccatcactagtcaactcatatgaaagctttgttgttgtccgttacaaacagctaccaagagcagaatatcagcgagaatctgtctgtatcgtgctgctcagctgagtactacatgtacttctaggcctcagccagcttccaaatgggaccatttcccatcacacctttatcaaaccgaactgtagccgatcaaacaaaatagaccaccatctaagaaaagttaggccaccctgaagtattttaaaggaacgcacagcctcatggctacccctgaccctagagatgtctgacagaagcaaggcatgctcccatgccttcaggttaccttcacagaccaagacaccttggctcacacacagctacaactcaaggtccttgtgacaactactgctcgagagaaagaaaacttcagtgtagtgaaggaatgggtccagaagaccggatggaatcatggaggtaggacgcaggcgagaggcattgctcaggaggtgcagtctgggaagatggagggggaaacaccacatcccatcagctgctttctttccttccttttctgtttattcctttcatccttttttaaccttctcttggtgagtacctcgatgggagatgtgtaagtacatacgtaattacgtacgtacgtacgtacgtacgtgcgtgcgtgcgtgcgtgcagttgggaggtgtgtatgaagagatcttcttaccatggagcacacatgcaggccagaggacaactctggagttagttttctctgtccccacctttcacggggtctgggacttaaattcaggctgccagcttttcatgacaaacaccattatcttctgagcaacctcaaggcccctccatccttttttaaccatcctctctctaaaaaatatctactgagcacccgcagtgtgtttagtcactttgcactttgtaaaacaagttagaaaacgttggcaattcttacaactggagcctgaggtctgtgaaggcaagaacttgggcttcaaagatgcaaacgagcagggtcaagaaaggcaaaggtatgtggacactttcccccttcttagaattgggatcaaaacacccatggaaggagttacagagacaacgtttggtgctgagatgaaaggatggatcatctagagactgccatatccggggatccatcccaaaatcagcttccaaacgctgacaccattgcatacactagcaagattttgcctaacggacccagatagagctgtctcttgtgagactatgccagggcctagcaaacacagaagtggatgcttacagtcagctattggatggatcacagggcccccaatggaggagctagagaaagtacccaaggagctaaagggatctgcaatcctataggtggaacaacaatatgaacaaaccagtaccaccaccccccccccccgccctgagctcgtgtctctagctacatatgaatcagaagatggcctagtcggccatcagtggaaagagaggcccattggtcgtgcaaactttatatgcctcagtacagtggaacgacagggccaagaagtgggagtggatgggtgggggagtgggtgggggagtgtgtgggggactttggggatagcattggaaatgtaaatgaaataaatacccaattaaaaaaaaacattagaaaaaaaaaaaaagaaaagaaaggcaaagagccaaagtaaggcagatgtataaacattgtggagctgttcccgaagagcttcctggatgattgagcgttaggcctgggcagagggaataattactctactttgtgtcctgtagaagtgaagccactgatatcagtaaggtaaagaagctggaaaacgggggaggcttgaaaagacaataacatagggtaagtgggcaagcccaggcctgcccagtaaaactccagaacacacaggctgtacagctgagatatgctatatcactacaggaaaacactgggtctgggcagcttctgacgacttgtgtaaacagagcaaaggccgtttgaaattcagcaacatggaatgtgtcttctgtaactggaccagagatgacctaaagcagttcagaaggacttcacaaagaaactgctctcactctcgatagaagcaggaggagtctgtccaggatttcaatatacatcaggctgggttggagtagggtaaagggagcctggatatctagaacattccagcttagaatctagatatcaccaaaatacttccgagctgtgtttaagagtaaacgggcagagtctgctaaatataggcaaaaagttttcttagagaactcggtgtgtaaagaggaaggacccagactcctccaaagtgagtctgcctttactgtaacaacatccagaaagtgacctgcagcgccgcctctgacacaggaagccccttttccctgtcagcctgaagactgcccctaataatacaatttaggactcaactaggagatattaaaacaggtagcagggggaccaagcagagctaaccagagagggaaatatttatacctatgataacatgtttcctagtaataatttatgagcctactggagacgagagaagcacacaaacgaggagtaagacaaaaaagaaagcaagagatctgaaatgtaaacatcatgcctttggcaaactctcttcagttaaaaaggacaggacggctggggttgactaaagcaaatggctacatttccctggtctcttgcttcctccatgctaagggttacgggctgatttacaacttcctgtgttgtttttcaaatctatatttgtcagcacatttttttaatgtcagattacttaaaatagatacgccgggtcttcaaagtcagggacaatgacagcattgacttctctcaaagtttcgtagcactttataaacatcctaaccgtttagcctcctgaacgctagatttctagatgaaactcattttactaaacttttaagaaggcttcccaccccctttcccaattttcttgatgactgtggagttcaaccagaactctttgaagttaaaatgagccaaataaactctgcctcagcctcatcttacacagggactttacgctgtcaaaacaacagaaagtatccctggtcaccccccccccccgctgctcccctccccgcccccgccaaaagaataaaaccaaaaagatttagtgtcttccattgtagttctgcttccatccgtcatggtgtgttgtctccagtaatttctgcaaaccacaggtaggtagttgttcagggaaagagagaatattattctccacaagatagcttcatctgcaggcaagccttccgcagggccaacggaaatgcaaaaggagaaagggtaaaattcaccttttaagtttatatctgatgattcaaaacaggctttccactatgataataccttacctcttctttcagactcactgactgacagtgttgtttaagttcaaacccttaaaaaaaaagaggtaatgtaacatacttcaatttttttaaagatttatttattttcatgtatgtgagtacactgtcgctgtcttcagacacaccagaaaagagttcagacacaccagaaaaggacatcagatcccattatagacagtcacaagccaccatgtggttgctgggaattgaactcaggaccttcagaagagcaagcagttagtgctcttaactgctgagccatctccccgccccacgcacttcaatttttaatactaaacccctcagaaataacacaacatcccaaatgaaagccaacaaagatgcatatatgacagtggctttctttttagtacttcacattgtccctgagtccctactgtcgaccgtaacatggttgggtaaacaagcatactgcaggtggtctgcaaaaaaatattctgaaaaatcatttggtgtttcccagctatttataactatgttttcaaccctcaccctgagaaagttgccagatagccactaagaatcaaaaagtacaaatccaaatttagtactttcaaaatcactgacactccacactcatcagaaagaccccgaaagcccgccttggaatgaccaaaccttttgcttttgatttaaaaaatatatatgtgtgtgtgttaaagggaacgagtgagagccaggccatcacaggccacatttgacacagaaaaaacaaaagatagactgataaattaggccagggagggagtaaatatcccttcctctgcaaagcggacaagttgcttaacatctgataaggcgacacagttgcaaaatatgcaatggtaccgaagagaacgttcttgggtccagggaactcattcagtgaagtggcacccagtgtgtttgacatttgagacactgtcactgattagatggcactgtgacagccacatcctactgaatgtaccagcgggcctacgagacattaccaaacacagataccacggatccatgtcgtcaaatatggctgccgtagtctgtcttccaatgaccccatcagcaagacggtcctctgaataataacagtaattataaataataataaggtttaataatccctctccctttgaagaacgcccagcctttttatccgcattatctaatttgtgcttgaaacaattcgatgtagcagccaggtagcaattaccattacccttgttttatagataaataaactgaggcctggggattttcttctcatggcacaattaggaacagagccaaccccagagcccataattcagctctccgtcttccagattattgcatcctcaaaaaatatctgggcatctgaagaacagttctacccctcaggaaatgtttgtaccagagccagaccaaaacatcttttgcttcaaaattgcattgacacctagagaagaggacagatccaccggcaagggtctggcaggtgatctgtggtcctgatgaaaggcatacccaggttctatcaaatagtgtcactgcccccacccttgcaaatgccaaaggtctctaaaagactctagaatcagttttttaattatccaactttatatatatatatgtatatatatatatacatatatatacacatacatatatacatatataaaagttggtatatatgtgtgtgtgtgtatatataaagctggataattaaacaaactgagatatgtgtgtgtatagatagatagatacatacatacatatatatataaatatagagatatatagagatatgtataatatatatatttcaagcctaaaattatgaccaagtcaagatatatttgggcttttttgtttgtttgttttttgtttttaaatgggcccaaggtgttaactgatgtactctaaaccagattgcaaattggttttctggggcttgccaatttaaattcttccctgcagcttcagctggggcggggcgtcttcatttcctgtcccgacttgtgctgcagcaacctggtccccgtttaggtgattagcatgtgtgtgtatctgctggtctggaggctctgtgaagttataaatgttcaaactacccgtgtgctgtgccatgggtaaaaatagcactcgttattagatgtcaattcatagcctgcaggagcctggcaacattgtgaaccttttcaaaatgtaaatactgcatattaagcataggagagaaaaattagtctgccactcgtgcatttccaagtcaaaaaaaactaaaggaggagggggagagggagtggaggaggaggagggaggagaggaggaggaagaggagggggagggaggggaaaggaaagaactggcatctgcagcagtgggcatggtaataagtttgtaagcggtggatcacaaagggaaaactactccagaagtggcttgagtagttcctcctgtcatctctgccctgtgaatttcctcttttcgtgttctgtttattcatggcctccttgtggccttgcaggtgccatttagatgccactactttagatgcagtgtattgtggacaacagggttcctgttgttgttgttgtcattgctgttgttgttgttaaagtttttccattatcacacaacacttcttcattagacttgtaaactaggcattcctctcctttggggcgggaggggagtgggggtgagagaagtgggggcaggggttatgtggggaagggaggggggaggtagacagttaaaactttacaggaatttttctctgtgtgtcttttcccttccattaatagtggggaaagctggcaatcaagttaagctttctgaaacttttgacatattttagtaagttctgatttacatatgaagtcatcctccaacaattccaaacaaatgtcttttcaaagcagctcactttttttttttttttttttttttttttgtctttggctcacaacagaagtgagtagatttttttttcttttgctctcgcttttttctaccactcaaaataatagaaagttgtcgtctccttagattctttaatctcacagacgagctaataactgatctgcaaatttaccaccttaaggatgtgctaacggttcaaacataacccacaaacctcttgtggttcagccattctccgaagaggatccatgaatgggagtcaatactgttagtaatgttagttcacatagtctaggagaaagaacggagtatcagaacatgtcccacgtgacatcttcacaggactgctcaggcacatgaagatctggaaagggcgtctgattccctataagcatattttcagagccaaactgaccctccagaagaggtcgaaattcctagcatttattcccatggtagatatccaattcatattgaaaacacaacatttcaaaagatttctagtgatttcatttggctcgtaagtaaagggcttacatagaaaagaaggggggaaaagacacaatatttgatggtggagttttgtactgatgagtattaaattatgccaaaatgccattcatttgatattccttaaataccgtagcacaagtcaagtcaagcacagattacaaaccatcttaaataacacaaatgtaatacacacacaaggaacaatatagccagcttcaggtaatttccgtataacagataacatctggggcaaatgcagaaagtaagttatgcaaaactaatttgcaagtgaccacatctgtggatgttatttattgcatgttcacatagcagtccattattctgcttagaaatctcttctctttattagagcctttaatgtactcaccttgcttcaaatggcctgctcataatcagaatatacatatatatatatatatatatatatatatatatatatatatatatatatatatatatatatgttcacatgaagcaaattggttctttttattatatctgtttgtgttcaagcatccagaaatgacaagagaagcacattgattgctttatatccaaagttatatttagggggtatttgaaagtcaagcaaaaccagtcatttggccaaatggatatgtgtacatcagagaattctaccttttaagctcaccattatacccatggcaagtcagtctaggcgtttcccggtgggtcttggtccaaatgtcgtgagtgctagtcttctgtggaaagggggtggtcttataagatggataaattgagaccaaataggttaggattaggggttttgttttgttttgttttgtttttttaaaaaaataagatacattttcccttttctggttttatttttccagatttaaaaggtaacatattagacttttgaggggggaaaaacatgaaaaaaattgccatcctacaggaatgtacaaaaatagttataaaactgactttatttaatttgcttcaactattcatagacttgaggaaattataatgctctcccagaaaaaaaaaatctaactcaataaagctgaccatgtctctctgttttaaatagattttattacagagccagcaatgttgtaaaacatgaggttttgttaaaaaaaaaatacaaaggcctaattgtattttttaaagaaagtattgcatcagacggcttcatttaagcgtgtttgctggctccaagtgctcaccacaattattgatttgaatttcccttggacttgttttttaaggaaggcaaccgctttccataaggaaaacttcgctgtgatacttgggagccttttgtttatttcaaactctgtatttaaaactgcacctccgtctactgcctaacacagctaaatttaattcttcgtgaaagagagaaacagctgcggtttggttcattaacagtacgcagagcatgcaaagaaaagaaattctcaccccccccccactcctgggcatgaattgaatcaatttaatagttatatgaactacacacatttttaaaaatcaagagaaagaaaacctcaactgtcagccataatttcagcttcgggaataaatgtaagcctagatctatcaaagaaaggaagtgtgaaatcagagagacccaagtctccacacgtgtgctagggcacacacacacacaataacacacaccttcacacacatattttcatacacacacaaatgaaatgtattcacaaacatagactcatacacgtatacacttatgcacacaggcacatcaagcatacatgcccacagatacacacatatacatacatacactaatttgcatacacatgcatacacatccacacacagttacatattccacatatttacatatatacacatgtacacatacatatacatatacacatacacagttacacatgcactcatacatatagacacatacaaacactctcacatacatacacacatattcacagagaaagacagagacagagggaaaacaaaaaaaagaagggagggcagtatggcccagtggttaaggttctagaggctctgagttcaattccatatacccatgttcagtgcctcaaaactccctgtaactacagctctatagggatctgatgccctcctctagcatccaagacacccaagtacacacacacacacacacacacacacagagagagagagagagagagagagagagagagagagagcttttaaaacgaagtcagttgatcaattcagaccacagaggtgtggggaagaaaatgtaagacgtgaacacaaacatctgtttgcagttaactgtagaatccgaggaccaggacagcagagggcgaatcgtgggttctgcgttctgcttcaccaaatggagaggttctctgtaaagaatgtcagtagatgagggtcaacaagcagaagaccccagcctgtgtgctgagagcacagcaggaacgtggtgacagtaaacaagatagcaccctacccgcgcatgcttagtgccagtgggctcttctttctcaatgtctggtttgtccctgtcaggcccccccaccaaaacacaccctgcactacatacactgtggttttctcgccacaaattaaagtccatgcctccaagctaacaccccatttccttcccaggtttccaatttcccgcaggcaacttctgtattttacctgtagagtttcaggcgacacggaagcatggctggcttctttttcttctctaggaaaaacgaaaaccaacagaagacttggtagttcacaagccaagaatgataaggggttgcacatagcagtgaagagacacgggtccttgatccctcacttggcaaaaagtaacagcctgccaatgtgacaggagcaatgtcctgatgcctcaatattctgaggaacgtttaatctacccgagataaacagcaggaatgacatcatccaatagaataaaaattaaaggtctagcaatatcaataatttcccaggatggacacgatgataaattacagtttaccgaaaagggaactgccctgggctctaatacgactgcctgctgtcactatgcaattagttgatcttagctcaatcatgttacctcttcattgccgaatatccttgccttgatatgtctacaactaaacatagggaggcagaggcaggaggatttctgagttcgagaccagcctggtctacagagtgagttacaggacagccagggctacacaaggaaccctgtctcgaaaaaccaaaacaaaaaaaacaaaaaacaaaaaaagcaaaaattaatgatatgaatgcagtccaaatgcatacgcgctggtaaacccatcaagcaaaccctgctccagccctatccaaagcctgtaaaggaaaagcattaacatttcaatgatggggtgtaaaacagagaacttagaaatgactgcaatgctttcaagatacccccctctcccaaaaaagtgtcctaagatgctaatagggtcgggaatgcttttccatagttcttcaaactcgcatgctcaggcccaactcttgttaccagagcagtgagtgacttcaactcagaacttcactaacaagctcgtgagtgtctgctatgtaaattggaacaagttattgattttttactgagttatgtagaagatatgaaaaccagagcattcaagtggccatgtctttacagatcaactgagatgggaaattaaattatggttaaaaacactgcctgttaaacacagaattagaacaaggggaactaataaaaagaatcagaggcttgatgcctttagtaacctcatctcctcatccatgccacgccacagtggctggactacagacccggccaaagttggcatccaaggttctccatatctttcagtgctgtttctgacagtcttcctccgccaccgcatctgcaccctgttggcaaagtaccatcagctgccctcagggaagtctcactctgccacgagtttgctgtgagtccctctgatgattccatgttctggtcttatatacacattgaacttcagaaattctagtgtgtctaccagcgtgtgtccactgctgggatctctctctctctctcctctctctcttctctctctccatatatatatatatatatatatatatatatatatatatatatatgtgtgtgtgtgtgtgtgtgtgtaacatatatatatgtatataataaacacacacacatatatatcctctatatatctatctctatatctcacacacgtgtatagccacatgcatgtggaagccaaaggttaactttccatgtggcactgtttcttctcttctcttctcttctcttctcttctcttctcttctcttctcttctcttctcttctcttctcttctcttctcttcttcttctcttcttttctgacattagagcttaccactgatcctcagggaccctcccacatctgcttcctcagtaatacgggatttggggggcggggtcttgtttgttttgtttgtttgttttttgtttgttttcatatgggtcttgaggctcatgctcaggtcctcagcaaaggcagattctattgccccgggctggtgatagtctctatgcttgtacccacaagagcatcggcatcccgctaagctgtgccaatcagccattacagggtgtagtaaggaccaaacctcctgctgcgaatggggaaaatagatggggggggggggcacggcggcttagtctccgctctctgcctacatagagctagtagacaggagtgagaggcaggggcatggtgcagagattaaggccaatgaacgaaccctcaaccacagagtccagaaatgatgagaagacaatgctagttatgagtgagagacagtgcatggaaggctccaggcaaccaggagggcaacggtatcaacggcttgaagcagatggtacttaagcaaaatacccgatttgatatggtgagagaactgactgagacagagcccccccttaccaaaagctcttcttttacagcaaaccatagaggttgtcaagcctgcagactaccccttcccagcccccctggaagaaggtatctcattggacacgtattcaaccttcatagagccattgccaacgccggacatggaacagaaggtaggcttgggaagtccttccccatggcccccaccccctgcctgctaaagcattatcatggtgcaagatggaaagagttcccgtccccccatggtctctgctgctgacgttttcccagacaacattccttttagacttgattcacacacaggccagatgatggtggtccagagggattttttcttctcctccacatatcctaccctaccatagagatccccaccagcaccactaccaaatcacttgtaatccctaaggtacatggttacataaaatcagtgcctccttctagttcgatagttctccaggtagggccacacagagtagaagtttgaggttgtgcataaatcccgagcactcaagagctcccctgagtgttcctcactttcagtgcctgaatgtgtctatttccactgtcttaggtgctggatcaagagcaagggactcaggaagccctgctggagagtgaaatgagagaggaggatcccttaggtggcttcaccattgatgacgtaaaatcagccctggagcgagtgacggatgaggttttgattagcatgcaggtactgagtgagaaaggacagtggtatccaccccacccccaccccaccccctgttataattggcaaattaggcaacatctgtaaacactgctccgctctggtcaagcaagagcctggtttacagtttgcacactccacctcacaaggctacataatcctccactgagtcttctagattcagcaaggtcatagaaacagacccaccagcagcacctcgtgtgctgtgtgttgttggcctacaaaaccaatgacactgaaaccccagaaaaagagctcccggtgaagactttgagccacaccacacggtaaacaggccttacccaagagttaagtgacccgggctcctgaaaagggattgctgccaatcaaccaccgtgcttaactaagacaacctcatgcagcatcacgtttggaattcttctcaggtacttcctatgtcttcatacgtcactaattgctaagccatttacaccaatgggtagtagggactgcctctgggcagctgcccatcatctctcagagggttattttgtgtttaatacttggctgttctgtccaaggaagaaatacctactactaccttcacataacaacttacaggacttcacatcgtttcctaagccagatgctcaaacaacatgaattgcctattttgagaaatgaccatatatcacaacaacacttatgcacttgaggggaagattggtttaatttttcatctgtacttggggccatatatacaaagcacactattaataactaatttgggaagagcaaaaaaaacttaggttgtcctaagcatacctcactactcgcttaatcgtcaaacattattgcaatatttacacgagcatttaatgacctggtgccaacagaatcagccaaagtccccagcttaataaggggtgtttagtgtttaccagaaacagtggaagaacacgttttacacaaaggcccattgttaacggccctgtgaacgtaataactggttactgtgtagaagggcagggtgcagctgaattaagctgagttcagaacatacctcctttttagatttgataacatttcctctaaatatagtttacgtataatcatggccccggggctcctttgcaaatcccacagctctgaaattatcgccgaggaactaccagacaagcaagagaattgtttgcaggacccacaattgaaaccatctttaccaaagccacgctccgtgaagggagctgtgtgtttctaactctccactgacacttttcttttaaagcattcgagtctgcagcatcagaccttctcttctttgacaggatggacaggattagtctacctggttgttctcttctcattagcatgaagccaccttggaagttcgacaacgtctacacctaagtacagttatgcgcaaagggagtccgtggaccagaagggagaaccacagaccttttatgtactgtgagcatctccatattgggcggatctaatcagcgtggggcaaattactgctgtccaggcttcaccttcttttcaatgagatggcaaaatggatttctacaatgtctcaagatagcaaaccaccatgtgtattttctctctgcaatcctgctaaactccacgcaagccaagagggcacttccaacgacaaatcaaaagaatgggactcagacagattgccatttgtctgtagtcccccggctcagcaggcttagcaggtgctatgagcctggccccagctgcagcggcagcaccatccaaggaagccacacgtctaacgcagggcccaggctactccgttaatacaccatggcttcttgcttcccccctcacctacctccctcttgggcaaattccaagttgggagataggcctgagccttgcttcagttgtgtcctgcgtcaatgggtaagctactttccacttttaagtgatcccagttctaagacctgccacgcccccttttgaaacagtgtcagtggacactggatccaaacatctgctgtacccactcagtgaaagtttttttcttttttttttttttctctcagcttttgtgatcactcggtgtttttttccttcctctttctttaaaagccacagtgttattgcagagtctgcaggaaaggtcaatagagaattcatgtttcagtacattatatcaaagcgagttctctattgtgattccaagccaatatccacttccctaataaagaaccccctgaaatggagagtaagcccttaattgttatgtttacccacttattttttcccacagttcactcctccgttttagagatttattaagaatgaagttctcttggccctcagttgtcaatgaaaattacacagaatagaccaaacattttaagccaatatactctatatattttcattttaaagatacagttgaaatgaaattagcttggctccaaactgcataataaaaaaaataagacccaatggaagcaactttaatatatttaaagaatcatattttagaaaattaggaatgagaatgctgaactcctgcatcaaagattggctgttggccctgacacagccaacgaataaaataatgtggggaaataatgtggccataacttgccaccctgcggtttatgatgtcttacgttacactaccttacattgtgttatgaaagttacatatgttgttgcatgggtaacataatgacagctttggattgttcatgttagagaagtcatccaaggttgtgatcagtgaaagctactgatcacaggtcaggggattcagaacacttcctgaaagagatagcagaagacccagccccaagatgaatgtctgttcagcagcactagaaaaaggagacagcaaaccaatggatcctttgggtacatgtggattcttttcattctgactcggttagttgtagctaaactaaagcacgaatcaccgaggtctacatatctctcaagttttctttcctcctcttaagcacatgagaccttcaggaacctgctctccaaagcccacacacagcatgataaactctctcagggaaatgcaaggaaaggttccagatcttttgggaaagctttgtgagacgccaaagaaggagctggttagtggaagcctggccgtacttctctggaaaacacaagacgatgagtggacacagaagtgcctccgtgaaaggagaagcccacctcctgactagaacataccatcccagtcctttagaactgtgtcggaattatttcctcagacggtgtcaacacctacatggtgcaatattccatatattgatgccaattcataaggcatgataatttttaatatttcatgataataccttagtgaactgtgccatgagtcaagtatgttgtgacatcgggagttgggattgtgactgcgaagctgaagcacggtgctagctagtcactgtcacttcttcatggtccacacaatgacagaaagtcccatggcttgtccaaagtgacctagccaaacacaaccgtaggctagttaatagtacataagccatgatccttttacttctgccagagtacttcatgggggcattcataaaaagggacaactgggggggccattttatcccttcccctgcctcatccactcaaccactcacaaagaaaacagagaagaaaacagaagtcaaaagttagtcaatgaagaaggaggaggaggagaagaaaaatgagaaagaggaggaggagggaaaaacaataaccaaacaataactaccaccttaaaaaccctgtcccattctatactcctataaatcctgaatccacaattgatggcatcaatgtgacctgtcagaaatatcaactcttcccatgaggtgaaataccaaacctgattaaaatgataatcaggggaaacatttcaaaattatcaattgcattgactttcttaaaagttacataaacacataaaaatagttttaatcatatctgctcatgaaactggttttttcccctatttagaacacagttagcacaaagatttcaaattatattacgtacttaaatggtctagactttgactccttaagacacagaagtttaaagtgttctccatacacgtgtccttgcatgagtcactcagacagtaacaaacctcccaactgctgtggtccctgtatgcaactatatcattcatccttgctaaaagaaaagcatccccagagcccctagcgttgagataacgtgcaaacgtagtgagatgcatttctggaattacagacgtagcaatgttagtgtgcacagcatcatcgccagaggctgccatgatccctaaaacctgtcaccaattgcttatgagaggtgtgtgtgtgtgtgtttgtttgtttgttttttcatatcagttatatattacacagtggcatgcatgcaagaattgtaatgtatgatgaatactcttaattatgagagctgtcctaattgtgatattctttgtattattatttcatgcactgaagactccaggaatcccatttagactgcattagagggcaggccaaagcaaacgggtggaggggcccacaacaccgccccgactaagcccagagcagtttctctgattcagccttcactggcaaacatgtctggaaatgcatatcagttatcctatcttccaccatgaggctgtgtgaaaaatggctgtccaaataccacttcctgtccgcggtggacatgctatacattgggaatgtgcaaagaaatactataaagtgttatcgaatcaccacaggctggaacacagctctgtctgcaaaacaggaaggtgtgcacgggggataatgtctgtctttaggcactatagtatgtcaaaaccacaaagacaatgtgcagccaaagatagctctatcataaccactgcatatatatatgtatatgtatatatgtatatatatatatatatatatatatatattatatatataattgtctccacagaaagagataagtgaaaaactccaagtacaggaagaggcctttaacgcacgaatagagaaactgaagaaagcctgaagacgcggtacaagcaaagtgatgctcaacttcagagaaacaaacaaaaccggccagtacaatagtgtctctagagcgctgggtcacttccatgcagtccgagaaaggaaaacccacttccggttatccggactgactggcagcacgttgtcccgcccctcccatcccacacccacctctgagtttatagtgtaagagcattgctttgtgtgtataatcttggagagttatatacgaaaatacaattactattaggatgctgttttgactaataaatacaattcatcttccacgggaatgaaaccagccttttgaattaacaacacaaaaatgtagaaaaataataatagttttacccattagtggccagatgggtcaggttgatgcagtgttgtgaggagaggccacacatcctcactctaaggtcaaccttgctaaacaacggccatcctgctatgcacagagagagcgggtttatttttttcttatttaactcatttggttttcttatttaaacgtttcagtgtgaaaccaattttctgaaattatataatgcagtttgaagcattttaatttattctgcactgtatttgctgtttctaatcttgttaccctcccaagagaacacatgacctatataaaaagaggcaatgtataaatgattattaaaggccaacctatatatagcttgtaaaaaaatcttaaatacaaatcaaactcagagttcctaaaattaaccattatactgcaaaaggatgatgagacactcaaggaagaaaaaaaaccctcagcctttaaatacccttatgaaaatacaatttcaagatgaaaatagctgtgtgccaatggtttgtccataattaggaagattaattaaatcactacctgggctctttcctgtattcatattctggaaagagggtgcaaagcactggagtgagaggggtcccccaggaatttttgaggtacacatacctcattctgggtagcatttggtcggatatggatggtggccttactctatcagtgaggatccaaggaaccacccagaacatgttcttctgggacagaggatgaagctgacggcatggttaaatacccatctccagagacataaggaattcttaggatgaaggcgtgcttgcttctcatgctagagacctgggactgccttcctccccaccccacccccagctcctctgcctatagaaaactggagaagctgtagaacaatggcctgcatccccttagctgtcttttcaccagagatagcagtggccctgaagaaaacaagggcagctaataaagaagcatctagaagtgactaagcaaagtttcaacagcaatcagggatgtagagtggacctaaaagaaggcatccttgagcaaggattgcaggcatgtaaagccaatcaaaaattaggtgagatgtatagacagatgattgatggatggatggatggatggatggatggacagacagatagatgatggattatagatggatagatagatggtggatggatagatagatgatagataaatcgatagatagatagatagatagatagatagatagatagatagatagatagatagatagataggcagatttaatactctttgtagcctggagaggcctttgtaagtatcatgagctttattttatagtgctggctggagtctaagtcatgaacataatttaagccaaacataattaagaattaatgggtcagaggctggagagctggcccagagggtaagagaacttgctgcccatgcagaagaggcatattttggttctcagcatggacacgttagcttgcatcaggccataagtccattcccagggatccagtaccttctcctggcctctgcaagcacgatgcacacaacagttcacatacataaatacacacaacacataaatacgtataaaagaaatattttaaaaatgattagtgggccacagcttcaaatccagtggtacataatttgcagaggacaaaggtggaatgtcgtgggattttagagtaatttccccattattgcacatctggcaagtggtaaaacagggctttgaacctggactcacataatcataaagctgatatagtcaacctttgtcttcatctatctcgtagtgaagattaattacagtaaaaacttaccttcccctcaccctttttttaaagttgtgatactggaacaactacttacacaatcagcatttaggaaattcatgagaggaccagatgtttaacccacatgattctcctgaatcttccagagtctctggaggctatcttccatttgacataaaagtcaagggttttcccttaatgttttaaataactaagttagatctcctttatggcaggcaaattacctattaatttaagcttcctaagaaaagtcagtctaaatcagaacgagctcaccttgttgggatttacaaatgcccaaacaaagatcagatactaataatacaatttgccttcagacctcttcccgctcccttgaagtgcaggcattggtaagagcagctcctcacaagtgctcagagctgtgaaagggcttttgcatttatattaatttgtagcttctgagaacattccatggaactgtcctcaatggtcagcctaatggctgtatcttctttggaatctaatctaattcatttggggtagtttcttggtattagggtgagtaacaaaagtccttgactgcctgcagctaataatggtccccatccaatgccagatgctaaacacgtggataagcagggtgatttaatacaatagcagggacataaatgaagggcagaaatgcacgaggcagaaatggtaaaggaagtgatctatttattcagccaaggatgctctgatgatggcatggtgtggcgatcttagagcaaagaggagggggcggagtcaaagtccacaggggaaggatgcaagcagagcgggagcgatctttctgctgcgttgcgaattagaacctcttgtcactcaaacagctttgagggacaggagtatatgcaggaccatgcccctgataaaatgtctgtgctggcttccaatctcaaaccctacaactcccaatcaagagctctttctagtgcttgtacccagcatggtgatttgactcttcttgtcacaaagaacacgctgatgcgtagcctcaaaatggccagcacttggaacccataaagtgtaatcggcccctctacttaaaaaatcgtcaatgaaatttctcatgtaggagagttacacataaattatgtaggtatgtgactctgaagatggagtcatatttgtcccacctggataaggaagggtcaggtgagttgtttccgaaggacaagatgtggaaaagagagaggtcagaatcaaaccctcacagtcaacatccatgatcaacactgcctcagatgggtagtctgtcgagtctgtaacagtcaactcatgttggcaaccactgaaaacagtgttctgtctccattacctccctccccaagtaatgggaaataccataagaaaaataccaagaaaattccactggggaaagcccactgtgatacggcccaatgctctcacaggtcatcaaaaataagggagggatgagaaaatatcaccacccaaaggagtttaaggagataggatggtctcgtgtgctttggtcactgggtggggggatgggccacagaggaagtactgaagctatgggtaaataatgggcttgctcaagaaaatcctccaccaccagttaattaattgatccaaatgcatcatactattgtaaggttagtgacaatgttaataattagtagtaactaggtgggaggtaagaagggaggtaggggaaggctacgtgagtctggggcacctgcccaatttgtctacaaatctaaaacggttctacagaaaataagatctattaattaattaaaagagggaatattgaacagaataaaacaaggtaattaggaagaaaaatgatcctggccacattttgtcattaatgaaatgaccctgccttataaacagcacaaaagaaattaaatatactcatcttgcaacctaaagagtacctttcttctccatgaagaagacagtgatgagggcaccgaccctttggagagaggggcagatgtctcacattccaggatctccccccacccctttcaattctgtggaagagactttcaaaactttctgaaaatacactcactttataaatagagagtatagtgagttattttataactaaaactccagtgctggagaaatggctcagcagttaagtccactcagtgcttctgcagaggatccatgtttgttttccagcgcctgtaagtgcaaacatccctttcaaatgaagtgatggggtgagagctgtaccctagctgtaagaatacacagcttggactgagcccagagtgtttcctcctctgttctaactacccttgggcctaggtctggaaccttggagcctcagtacaatctaatcttcaagacaggaacttgaagagtttagcttccagcctccatctgttgacctaaacctagaatttttcagcaactgagactttctgctgaataaactcacctttctagcactttctgaactctggctgactggttcaactcagctgttctggctcaaactcttctccaagctgactgattcaaattggcttctcttagcttctgattgaattgctttgcttggaaagactgcctctgaccaagactgcctctgacctgctccaaactgaacttaactgaattgaattgaatcaaactgaattctctctctctctctctctctctctctctctctccctccctccctcctatttaaatagcctctacttcctatctgttcttgtgtaagttgagcatatgctgtctctgactcattctgttatatctttctctgatttctcactttgtctgcccctcaattagacatcattgtttgggatcaaaggtgtgtactaagggcatgcttatgttctagccagagggattaaaggtgtgtggtatatctacactacttctggatcatatctttggatatgcccttaccagaatagccatgatgctggattgaaatttctcaacaagcacccatataccaggcagctcataacacctgtaattctagttctaggagattcaatgccctctactgacctctgcaggctactgtatacacttggtacatataaacacatataggcacacatgcctacacataaataaaaataatgagtattaaatgaactgaaatttttacagatagcactgtaatacagtcagtcaattctctagtcttgaatgaagaggccacccttccatgatgtggtcccagtctcccagctgctcctaataccagaaatgatttcctttcctggtattttctggtgtataatttgggctgttatgtttcattaactcttcagtgtcctttgtagctatactagaccttggggacaggataaagcaaatcagtcacagtaaatttatagtagtcgagattcacaaaaaggaaaagtcttcgctctattctgccagactcataagtgattctatctgctaagggagcagaactgtctgtaaccaaaccatggatgtgacacaaaggactcagtttcaagaaggccatgagttttcagggagataagtactcgggatggctgttcttcatccctgaccatcaacttgacagtatctgagattcacacagacacggctctaggcaaatctatgaggacatttccaggaagcgttatttgagaagaaagaccctcccggcagttggtagcaccctccaaaggacaacttagatattataaagaggtccaagaataaaagtggtgtagtccttgcctgtctgcttctgctccttgcttttgaatgggccgctccctcctcctcctcctgctgctgctgatggtggtagtggtgatgacgatgacgatgatgcagtctgtcagtgacaccagtatctagtctcttgacctttcagtgtaatagggaatgaagacttgagactctccaatagtcctccacgcattgtgcaccaggttggaactgctaaggcatccagctttgtaccttgagcagctgtgcctctctattgcacagactactggactgccctatccagcacagtctcaaatggcaccctgccatgaagaaaaacacacacacaccccaaaaaaacaaggtctggaaaagcaaaacttccctgcacacagtggtgcattgaggagtggtccctagagatacccatctttggattattgttgcctctgcctaaattactgtgttggctcagtgtgccattctctgtgtgaacttgcacaacatgtcaccttcttgtcactgtccatgagatgtgacatctcattagacatccattagacagaagcctgtgtgtttttgtagcatgtgaggtaactgcctcttcactcacttttagcctgcgctcctctcccaagctggccatctatgacataattggcccagtctcacaggtacggtaaggtctatttccaaggatcttctgacaggagctcactttccatcataccatgtactgcttctctgcccggggtgtctggaatttgcctgcacataggcctggagaaggcagaaaaggctgaaacagagagcgtccacagcctgcttttcccttctggagagaacactccaaccgaaatggaagaatactgtggttcccagtctcttctctgggtacatagatgccactgatgtgctgagtagagaggaagtctggaatgggggctggcggtccacgttttcccttgggttgtctgcatgctagccgggaaggtggaacccaggccttgcaggatttgttctgattgggagcaagtgttgaggagaagagaaaaggccttcttctggtatcttgggctcgtttaggggaaggccttctctgaggtccgtctttaatgaagcagctctctgagatgatccttgcttgttcatattgctttataggggtgggtgtaaattcatacactttatttggggtgaattggggattatatacatcttgggggatgtgcgtgaagatatccaggaaggaaaggtcattggttgaagggtcatgctatctagatacctcattagcatgcagaaaaactccagggcctatactatgaacgcctgtggttctctcagttgggacttgtgcttatgtgttccagagcagggacagagacaggaggaagcatctctcctcctgctgttcttaaatctctgagctttctggggtttgaggtcactcaacctcaccatgcctgtctgatggcacaaccctacaaccttcttcctattctcctgtaagcaagactggtacctttacaaatgttccagttgaggttagaatttctctagtctaaccaaattatccattccctgacattctttaccctccgctgaggacatttctttagttgatgaactagttaattcactaaaaattacatactaaagatactctgggtctctgcgcaaggcctttactaaagcaagcattgatatgttggctgccatggatataaattataacctgctcagaggactgacacgcacttctgaaacatcattctgctctgggagtctgcagctgtcacttaatggaaagggcagcacactcaacattggaaatagaaaacattgattttccccctccctcaaacatacccaataacccagttgtctacctgttggaactcacatagaacacttctagcagtgaaatctaatctcaaaatggcttaaccattgaccagtgtatgccaacttgcataaccagaagaaagaaacttaaatacagagagctttgggggaatccttaggagccctgattgcctcttgttgtggtgcacaaagttcagcttcctggctttcatcatcagggctgtccccttactacccagggggtgacaataatctcctcatgtactcaaagaaaaagagatttctctttgttggcctctctctttttaatttaaattccttattttgaaataattataatcatatgtaattataaaaacagtacacaagaattgcctaattacatcttatgagacaatagtacaaagttaaaaccacaatattaacgtaaaatgcattttatacatgtagggaaatgccaaggaacaaatttaattaatatcaacaatggaaatgaagacattaccacaaatgtgtctttctctcttttttaacacattttatttgtgtgtgtgtgtgtgtgtgtgtgtgtgtgtgtgtgtgtgtgtgtcgcaagtgtgtttctgagggcctgggggtgctgaggagccagaagacactggagcccctatactggagttagagatggttgtggcctgatctaggtgctagaaatcagactctgatcctctggaagaacagtacatattattaagcgctgagcaatctcccaggcacctcatgtgtctttttaaaacaaaaaccaaaacaacaaaaacaaacaaacaaacaaacctaacttttctcctagcctcctgttctcgtttgaccagaaccatgtcacatgagcagagacagacaaagggaagaaagttaccagtgagtttggtgaggcaggattcatcagctggggctgaagttggctccctaacacttggtctagccaatcctcgaacaagacagtgaatctgttagaagggttgggcagcgatcctatccactgttccagataaccttcttctgtggcattggcacccaggacgtcttagcgctctgggtgttcttagatgcaaacttagatgcagaaggaagatacataggtgctgctcatagatgagggcatagctacagcccgtcctttttttcaggtattatgcttctactgatgatcattatgtctgtgtggatgtggttaaaaaaactagtctcagagtaagaagctactgtttcaacatatctatgaaagatagaaacgagagcaagcctcttcctcggcatgcagggcactggcttcatcctgactgctggccaagtaccttggactgaggcttggatgatggggccatcactaattttatccagtcttcttctacattcaggttcagctactttattcaaggcctcctcaaaagccccttgtattcctcagaatttccacaaaaggatagacagatggggtacgagagacattacaaagccaccagttttggtcggggccaaaactgaggagacagacaaaatcatgaagtaggtttgggacatttggggcatttaaaaagacaaaaggcagaagctcttatgtaccatattacaacactgtcctagggtggaattaagcaaatataaggaggatggtgatgggtgcttgatctgaccgtgcaggggcgtcttcttttgatctgcctgttctccatacatgtaatttgtgatggcttgtcttcactgaggaatcagccacattttgagggtgtttctggaagaccatcatctaggacggcagccagaagaagtgaataactgaaggtggctggtgccatcccatcggctgggagcccagaaggctggggtaggctttcctggccatcaggagttgagtcgctttgctctcctacactgtggactgtaatgcaccgtgctcagcccaggaacgtcagagacaagcgggataaatggagacctctcaaaccaggggccaaagcgagcactatgtacctcaagttgttgtcttccatatttctgacagcaatgaaagcctaacgcactaggtatttcttcctgtgacaattatcagtggggctgcctggtgatctgattctaggaagctaatggcactccctgggcttcctccaaaaccacatagatgataacaacaacaacaacaaaaagccaaacacatagaacgcacacgtaatccaaggagtctgagattggaagatcccaagacaagtgagagaccctgtccatcaaacatcaagcaaacaaacaaacaacaaaaacagtataaagaacccaaggatggcgcctgaggttgatctctggctttcacatacatatgcatgtgaatgcatgcatgtacatgtgtatgcacacacacacacacacacatacacatatccatacatgcgtgtgtacacacacacaaacacacacacacaaaccaattgccacaaaaaaaaggcatgccattaaagattgtctcaaggtgccttaaaatttgaacagcaggtatattctaatagggactgagatgaaaac

SEQ ID NO: 2554 - DNA, 1129 bp, Mus musculus
aaaaatcttgaattccaggagaatgaaaggattctgtctccagatatactctcctctgaccagatcattgacctgttgggagaagagaacgaaaatggaattcaagaaaaactgggagtgtttctgaattttaaaaatctccagacttgcctgcgtgacgccatcctcttggactactatgtgtctggcttctgttgggccaaggagatgaacttttctattgagcagtattccaagtttatgaccttgctggacatgctacttcataatcttcaaacactgcacatgtccttagaggacagcattaagtggctcggggaagtgatggcagaaatcggaccaaaccactcgcagaagagtgaagatttccatgtcttcgaagtcaaggaagccaacgccatcatcgattacttaaaaatcagcttattccagcactacaggctctacgagtttctgttctactccaccagggaagaaattgtcatcgggactgagcaaaccatagaggttgtcaagcctgcagactaccccttcccagcccccctggaagaaggtatctcattggacacgtattcaaccttcatagagccattgccaacgccggacatggaacagaaggtgctggatcaagagcaagggactcaggaagccctgctggagagtgaaatgagagaggaggatcccttaggtggcttcaccattgatgacgtaaaatcagccctggagcgagtgacggatgaggttttgattagcatgcagaaagagataagtgaaaaactccaagtacaggaagaggcctttaacgcacgaatagagaaactgaagaaagcctgaagacgcggtacaagcaaagtgatgctcaacttcagagaaacaaacaaaaccggccagtacaatagtgtctctagagcgctgggtcacttccatgcagtccgagaaaggaaaacccacttccggttatccggactgactggcagcacgttgtcccgcccctcccatcccacacccacctctgagtttatagtgtaagagcattgctttgtgtgtataatcttggagagttatatacgaaaatacaattactattaggatgctgttttgactaataaatacaattcatcttccacgg

SEQ ID NO: 2555 - protein, 277 aa, Mus musculus
KNLEFQENERILSPDILSSDQIIDLLGEENENGIQEKLGVFLNFKNLQTCLRDAILLDYYVSGFCWAKEMNFSIEQYSKFMTLLDMLLHNLQTLHMSLEDSIKWLGEVMAEIGPNHSQKSEDFHVFEVKEANAIIDYLKISLFQHYRLYEFLFYSTREEIVIGTEQTIEVVKPADYPFPAPLEEGISLDTYSTFIEPLPTPDMEQKVLDQEQGTQEALLESEMREEDPLGGFTIDDVKSALERVTDEVLISMQKEISEKLQVQEEAFNARIEKLKKA

SEQ ID NO: 2556 - DNA, 123425 bp, Homo sapiens
cagattattttggtcattggactatttattttcacaaaacgtgcaatattccttagcttcagttaaaacaagtatgtgcacaatctatgttttctatttccttttgaacagtagacacccctcattttcagggatacattccaagactcccagtggatgcctgaaattgcaagtagtattgaactctataaatactgctttttcctacatatacatacccctatgatgaagtttaatttaaaaattaatcacaataagaaagtaacaatgactacaaaatagaacaactatgacaatatactgtaataaaagttacataaaagtagtctctctctctttcccctcgccccacaccaaatatcttattgcactgcaccacatgtatgaagagcaaaaacatggaaaaggggtgattactgtagttgccattttagaaatccatgttcatgtttacatcactggattttaccccattcatctcccttgctaatgtttaaaaaattaaacttcaaaggtaaataaatgaatgtgttatattatttatataaattattgtccacagtatattttaatgtatttattataactataaacatacatttacttattgtaacatacatttgtttatcattataaaagctagtgtaatgagactcttccagccacatcagtctcaacatcaaatttatttcaatattctgacttggtttcatagtactaaaatgaatttttgaactacataagtaattacaaatgatagtttgaaaaaaaaaaaccgaaaaccttccctagttgtctcaggatacacttcaattaggtaattcagaccttaaaataaaatcaaggtgtaatcactaattgtatcccagcttttctcaaaataaggcaggcaaaaagcacctaaacctagtaacactagaaatacctttagtatcacactatataaatatgttataggttcccttgttaatgagttgccaatgattccactacgatgtgaacatataaccaccagacatacttgattctactccatgctatacttgagctgttaagcaattttatgtaaacaggcatgctaaggcttgatttttttttacatcatgaaaaattaaaacacccttagccaaggaaacatttacatactgttcaaatgcataaagacgaaaaaacatttgcacatctgcaaaaagtacctacctaacacagtttagtaagctgggtccctccaatatgttaatatgtggactataatatatttaagtatgtgcttttaagtatagtatgaaaatatggttaataatagatgttttaaaagctaataaataatatcctggtgatctgtatttataaatacaaatacagtttgtaagctactgctttgagacagtacagtgtatgtaacttgggttcttaatcagatagtcctgagttaaaattctattgtctctactaaatagctgtgtaatactgggtagataattaacttctttaagcctcggtgtccatatctgttgcaaggtttaagaaagaaacacacaaaaggcacttagccagaatgctagttatgataatagcgatgatacactttgctcaattctcatcttttgtctaaggcctatcctgattgtcctattcaagactgcaacataccttgattttcttaaccccacacttctaatctcctcaatctgcccaatttttcccacttgctaaacaaactattaaccatcagcccataggatttccagtttttaaaaaatcacatataattaggctttttgtagatcttaactcctcagagtcacaaagacaggatgccttccaaaataataattagcaagttcgtaaatcttcagatagaatatagatttttcaactcatcagaatagaatttctgagaggacagagtttttgcctcttttgttgacaatgcttagaatagtacctgatacctatacagtagtccataaatatttgttggatgaatgcatgataataggaaaatgtctcagtgtgcattttcagcaattttacctggtcttaaattgtggaaaaaaattctttactccatttttttgttcctgattctcaatgtaatagtataattaagcactaatcactaaagttggagttagaaaccaggacttaataaggagtttgactctccatgtatggatacaacccaagccagcttcattggtgtcccccaggatttagggtttgcataaggaagaaagggacagctctctgggcaaagacagaagctaaagtctacaatgtttcatctagcatatgctgctgccagagaaaaattattgcaacattatgtgtccacaagaaaaacgggcccttctttgtccagtcaaggaaggaacagcaattttgccaatggtttttagaggatgcaacagcaacacgaaatcagaagcatattctgctctgctgtctcaagctgtccttggaccctgtaccagtgaccactggagtctcccacttatggagtccatcgagtagtctgactcttcttgagtatggcccaagatttgatgggaaggctgccacatcaagaatggccagacattcaggagaagactgcccaggcaagagcaacccaccaagcctttaagaatgtatactttaaacatatctccactacctaattcatctgctgaattgcaatcaagttgcatcagtcagctttgcatttatggccatggcatcaagttaagtctaatgctcaaaagggaaaaaaagtctcatttcagagtgtcatttgtctagaggatgcaggtcccaaaaaaggcattttcctagtgaccttcctagtaattacaagggtaattcctgagcaaagcagaatctactggaattctgtggcctaatctcatatgattcctgatgacagctgtgtgatctcatgtcatggtggttttgactcagatgttccatttgactccattttctctgtccaaagtctgaacatcacttctgttctgccatccagcttcccttctgttctcttttccaattgtctacttttgtttttctgtgcaaacattctaagtttgtattccttagcataaggaactgtttaaaaattttctgagaagaatcatcaatgttacatggagatagagtaatttttcctaaggtttctcagcaggtcaaaaatattcctcaaccttcactattctaaattgcaccaaagctacgcctatctgtgtaccagtgaccatgagtggcaccataaggggcatgatgagactatcatcaaaataacaggctggagaccaaccattaaccaccaagagactatgatttctagtttcagaaatatcatatataatcttctcatgctctttacagacctacatttccagcacacataggcaaatggtctatttccttccaaaattaatgacttctattattataaaataaaataaaatagaaaatgactagtaaatcctgtgatcatttgttacaatcttctgaaagctgcacaatggcaccctgaatttctctcatgtaaatgcttaacctagctttgaggcacatgaaatgcatttcattcaaaaagaaggcacatggaccttttagctatgtagaaaaataatatttcaatttttcctactggtcgcagtggctcatgcctataattccagcactttgggaggccaaggtgggcagattacttgaggtcaggagtttgagactagcctgaccaatatggtgaaaccctttctctattaaaaatgacaaaagttagccaagctaacaggtggtgtgcacctgtagtcatagctattcaggaggctgaggtgggagaatcacttgaacctaggaggtggaggctgcagtgagccaagattgaaccactgtactccagcttgggcaacagagtgagaccctgtctcaaaaaaaaaaaaaatccatgtagtgtactagaatcaagattaaccatagctacaagaatattttctactgattaatttactttttccatcatcatgctctaccatttattggatgcttagcaaagcactgtaacagattttgtggagggtagaagaaatcatcataacagcttctgacactagtaaggggaataaagctgtctctcaggtgaagtctttgaaggcaccagaaaagaccttctgttttgaaaatataagccccacaagttggcaatcctctattaaaacctcgttcatttgagctgcaaaagaattttccatcttcaagagtctcctagtacaaaacaaaacgaatgcctcctggtaaatgataagacatatcatctcatactttagttatgactatatacctgggttgataacctacaagagaaacacactaaatggattagcaattattgtgaaggccttggggaagtggggagtagggggtgagaggagaggcattgaaggagaaatggaaagactccagagataaatttcatcaacccagccagggtcttgagcacgccacacagctgaagtagcatggcatagcgagcagagtggacgggctgcagaatcatagaaactagttaatacctgtgcctgcctgccacatacttagccatgagacattaggtcagttaccttggccctctgaacctcagtgtcctcgtctgcaaaacaaaaataatactatctacctcttagtgcaagtaagctgattagatgaaataatgcatgttatttcatttccctggaattataaatgtgcaaatacaccagaaatgtttaataacagtaatgctttgtatttgctaaggtgaatgtctcaggcaatgaattctttgggaaattatatcacaacagaattttcagagatgaagcttccttagagattatctagtggcttttaaacttcttaaagctcaaaatccttccttctaacaaaatttataagaagctgttatgtaaaacaggtaaaactagaattgctatttttcaaagttggtgggtggaaagtggtgcagagaagaaggcaatagttggtcagttgaggcacttcccagaatctcctagaagaggtttcttcaaaaacgtcttcaaagagcaacggagtcccctgccattaattaagtggcacccagtgacttttaggcagtttcagaaggaaaaaagaaaaagtctgtgaaaccgtttgatcatagatattttgcaaatttaaagtgcaggataaaattctttatggctagctcaaatcatctgtttaaaaatcctgcctttgctttaggaatttgggtcagtctaccttggctaacattctggaaacagggtgcagtgttttctcagctgaagtattttcacataatacgtatgtccctgcttaggattgttaccttgttttttgcattaaactaccagttcacaaacatggatcagtgacctaaaagtggttcaccgaagcataaaaggagtgatgaaaatactaatgtaaatactaccataaagaacaatctgtaaatggaaataattaataagactcatgtgcaaatatagattatgaatctaaatgtgctgggacaagttaatgtatgaacgacacgcattctcacaagcagcagcccctgccatgtatactcctcgtagtttccaaattcacaacatcctatgacatgggataggttttattgtgaaaggtcaaagcttcaaggccaggatcagaaagaacaaaaaaggaaggcactgttgtttcccaaacacaccccagcgtctatggaaaggcttgccagggcccaggagctgttcttttgactttttatagcacaaattttaaatgagtcttgtcaacagggggactatactacacagtctgcttgacattggaaagttaagatttggggaaccaccaatctacacaagttgtctgagacagccagctgtctaagacaggcataacacaggtcccatgggtagttacagtccccactgtctgccatcagtcctgagggtaattgggtgcagcccctccagctggagaaaacggtgggctggggtgcagccctacctagacaattgtgcaagaaatccacaataaatacccagggtcacttacagacaatactgctcgctgcacagcaactaagcagtgggcaataacaacggtgttgaacaagccagacatcttccttactaaatgttttggagttagtttttgctaaaatcagtcaaagtccgagcaggaaacagcacaaatatggtaactgaggagagcttgttaaaggaactgttcacaaacaggtaggcagccataagtaaaatcaacagcagcaagaggaagccattaccacctctaggcctgaagaggcgaggggagggatggttaccaaaatcccaagacggctctagctgtggaaggggctgaaggacagaaggtggccttcagggcttttggtgcaggtatccagctacttctaatctgtaatcctgcagagaggggactgggagaataaataccctgatctcactcttccaccttccaaccccgtggtgatgctcccattggcaaaacccaaccacaagtcagagggcaaggaatgtggcagaatcagctgatgggacccataaaggttggcacgagaccaagcggagacggggagagagtggatatgaggagcaagcgaaaagtgtccacgtactaagaaagacaggaaccagtggcaattttggggaggtcggcttaggagagctaaggagatgagagactgattacagagctggcgtgggtaaggagagatgataagagagggactactttttcaatattttgatcaggaaggaaaggaaaatgtcacaaaactatcttaaagagatctctgtagtaggaaaagatagtattgtctggtttgggaaaaggacttaagtttcatctgaagagcagaaggatccattttaaagggagtgactagagaaagagggacaaacatatggacccaaaatgggaacggacggttttgaagacaagaattagtgttacataaatattctcaaaatagtattataccaactgttttctggaaatcattatcccaccccacaataattactcactcttagaatgtaaactatggtatgtttactatatcatgtcctaagtgtgttttatgaaggtaagacttcacaatgttctcacatatgacctgaacagactacagtacttcgttgaaatgagaagatcagatttaaggattagataaaggttaagaaaactttaaatacatttcaaaattggttaactattggaatactttctttgctaaaaataaaatatgtaactaaaagtgaatgcaattacttacaaattaaattgcttttagtcttttttcattctacatctatcaagtttcatggatctcaaggcaagaaacaatgtgctgtctaaattcgatctctagaatgatgagatctctcattaccatttaggggcatactgaattgtttcctgcctgatcttcttaagattatcattatctatcacttaatagattgaagacctcaggaatcacagtgttggaactactaacatgtcattaatctcactaatggcattattttgtttattgttgaagaacctcatcatatttaaaatgagctagagacacaggaaccatgaagaatgcagtagaaatgtttacccaccctaagaacacagttaaaatctgtcagtattcattgccaaatattgccacaccggactgtcaatatccattataaaattatctaggcccctcttgagtgttttcctggcatttaaaagtatgctttattttaaacattcaatacttggttaaactggtaaaattgtgaaaatgcccctcttcaagagaacatgattttatttataaagtgttgtgccactcacaggtttatggatatgttgattggaaaactttctttagaacaggaacctgaattcaattgatcaagtaatatcaagctatcccacatttcaatgtgatgtggtaaaagtcagtggtcttttaaaaaaataactgtaaactagacccatatgcttcctcttctcttccagtcctaaaacaatagactaagataacaaatggaattttgcaggctttggttagaggcctttatcttcaaaagagacctaggagggaagacttaactgacctttccatgtaagaaagtatatcacctactgagatttgtctttcttgttggcacctacctacaaaagaaatgggaggctaaaatcagcttcaacttgtgcaaattaaaagtaaccttcaggctaatgggttttaaacatcacttcttactgagcaaaacatttgtgtcccaaaaaattaaattaccccctcaaaactgacttctctaacaaattacaacattaaattttttaaagtaaaattgtaattcctacaaaacaattcccctctccctgagataaccatcctattactgttagaattgattccatctttaatggagttttgcatctagttctggggtccaaaaccaaaaacaggagaagaaaacctaaaaactgtcaaagaaatggcagcaaaattaaacgcctgaaaagtaaaccaaatctttgagaaaactggaactccacgttagagaaataaatgctttatcattttatcaaacactaaattcaaggaatatggtagagtccttaccttgaagaaggtgaccagctattttcaatttctttggagtggcgatcagaaggaaggaatgaaaaagattaagcactgtagtgagtggtggcttttgtactaactctagcaatcactaaaaagtgactatattttcaccaattgaagaaattttaatacggtcctattgaaatggggttgtaattcataaatgtattgttgcatgcattctttgtactgagaactaaactagctccttcagaagtgaaaataacaagggaaacagtaaaacccacttgaaaagatgggccatacatttacaagactagagacaactcataaacacaggttgacagtacaaactgtatactttgaactatgagacaatttgaaggaaaggcacaattatcatgaggttatataaagctaatgtgttatatttggtctaaaagacaatgggctaatataaaggagaggttcatgatgaaatattatattatcctggcagctgtctacaatatggactaacatcaggagaagcacaatattaatactaacactaataatatcaaacacagaccactactaggtgtcaaggctgatataaacattttcatatatatattaatctgttcaatcttcacagtcatgttttgaggccaatactgttatttcatttaacagatgaggaaaccgaagcacttaaatgatgtctgattttcacaggaagtgtcctgcatagcaacctacatgcaggtaaatacaagccaagtacatttcgttttcaaaggaggcgttgatcatccaaagaagtcaagaatactcatgctgctatgtgacatttcttattgtttgtaaatgtttttgttgtggaacacttcaaacatatacaaaaggagaatagtacactttctttctagtgtactattaagtgcactattaaagatcgaaccccttccattcacatgcctaatctagatgcatgtgctataccaccactcatttcctgtgcccctccctcattattttggaataaatcacatattttatatcatttcatcatcactaaattgttcggcatgtatctgtaaaagataaagacatatttttccttctaaacatgaccacaataccatcatgatactttaaaatttacaatgattgcttagtatcaaacatcaatcagtggttgaagttctaataatatatcttactttaatatttgttgaaacttgcaatgtgctagcattaggtactttgacatatttcatttaaattactactacttgaattgccttttccccactttcactcctactaacaggaaagactcggtctctcccagaggattcagggcctccgtagcgggctgctgtcggcctccctcccggcctcctgctcctctgcgcggtccccagccctctacccggcgggcagaggctcgggcccagcgccgccttccgctgggatctgttcccaggcccagggacgccggccccaccccagttgcctaggtgacgaggggccgcttctctcggccgagattgcggcgatgtcgcaggggacgactccctgggggccgaccccggcgggaaccacgcccgaatcggaggtacaccgcccctttcccttcccggtaccggtgccggtaccagagacctccgagcgctcattcccagtccgcggagtctgcggccaagccaaatccggtctccgaagaggcgccgcacgtctggccccggctggtgagcggcctgggagggcggcagggctgggagctgcgctggggtccccgacaccctctgcagcccggcgccccccagccggccccggcgcgccgtgcacggtgccagcgggtctaaatgtatgaattcttccattggacggctccgtgcccaaacgccctcataaccacgcgcttctaccgcaggttttgttttttggtttttcatgttttttttttttttaattctaggtaaaataagtaatctcagatttttaaatgagccagtctctttttgaaattgctactaattttgtaatgattacagtgttgcgattgctcaaaaggtgtcatgaaataataactgtttactggtgatggactgattaatattagaagattggtgtttccattattttgccattttcctaaacaaataaatacaggtgaaaggacactggctggaaaatcttctctggttatggctttagttgctcatcagcttgactttaggaaagttatttaatctccttggacaccagtggcttcctgtgtgacaaaaggttgatctttaggcccctcccatcaccagctctccataataaatgggttttaagtaactttactcataaacttaatatcctgagattttaagaacacatctgctgtgccagatattataaaaaaaaagtttaaatctttgcacacggagtctgttacgattgttcctaggaagttttttttcctccgttttgttaaggctctcaaggtgaataatcatgtcttaattaacattgctttgcttgacttccttattcgttggtctaaacgacattctttgtgcagaagataagtgttagctgcaattttataaatgaggaaacacaaggagccaataattccatgccttgctcagagatatataagctgttcccagtcgagattcctaccaatacaaaatgcagaccactaaggcatgcggactctcatatgagccttttgaaattagcagacattaaaagtacattttaatgtgataaactggtactaagcctattattcccttgtgatctctaatgtaagtaatacaatttcaaaagtagcacaggaaattttccaattaaattgtgttatttaaatatataccaagcttaagactatgcacaattatcagtgtacacatacatatgctcacccacgtagaccatgtcctttccaaaaagactgatcatttgggggttttaatgaatctggactttaaaaaaatacaaaattttttaaaagatgtaaagaagtgctatgcttcaggaaaaaaaatcattttataatggttgagtcagatgaatgagctagttatagatcttagattattatctaccctcttaggattgtcagcttgcacatttttcaacttcttggagggccaggtattctcatgacatgcaattcaggatgtgctcaatcacttagtaacaaacagaagaaatcaagttgtaacagggacttaattagcagtgttcatttactaagatgacacgctaattcgctgcttggtggaaactccattttccgttttaatgaaagcagagtttctgtagttcatggggaatatagttgatgcatagagctgtgtcattcattaaaacaagtcctgcctgccacccatttgtgctgattgggggtgtcgtatgttagatagaaaaatggcaagattctctcttgtggtctgttcccaaggccaccactttttaggtaaatactgaaaggttcttctcagatcaaattctttacaatgttgatcccccaacagctaatcgcttatggtgtcatttctaataaattctgtatccaaaatgacttagccagtagcccatgtagtcaactgagccaagcagttctgaattatttcctttcttgccaagtctgtcagaaataaatcataagctttcagtagtctgacgtttcccatttgttgtttgtggccaatacctagaatagaagtaattatcccaataacatagtaggcactcaataaattatgatgactaattaaaatcatggatggtctgaggcatgccaggaaaggtagttatctactctatgaattactctatgagttactgtgaacaagcagatatgagatgcagatctagagaaattattttttctgtgacattgaataagtcctgcttgccaaccttctgaattcaacatcccgagttctttagtaatattggaggaaatgcctccctttacatggtaaaactaaacttttggcagatatctgtatgaatgcataacagaaaaaatgacaaaaatctgaaaataaatatttgttacgcatagacctgtaagtgaaaggagtttataaatgtgtacttggaattcagtgatcgattttgtatcaataattttttcatatagtgactttttttaatatcttcaaaaatatctagggaaggccgggcgcggtggctcacgcctgtaatcccagcactttgggaggccgaggcgggcggatcacgaggtcaggagatcgagaccatcctggctaacacggtgaaaccccgtctttactaaaaatacaaaaaattagccgggcgtggtagcgggcgcctgtagtcccagctactcgggaggctgaggcaggagaatggcgtgaacccgggaggcggagcttgcagtgagccgagatcgcgccactgcactccagcctgggcgacagagcgagactccgtctcaaaaaaaaaaaaaaaatatctagggaattgaatcataagtagtacacttacaaggaatatacttcaacttacatcagagacctaaaagaaaacacaaatgattatttcccaattgcttcttctgagtaatgtctcttaaagtgttatcacatcacccagtaggtgacaattactcaatgcattcacggctttatcaggacaggatgcttacataattttgaggggtaagatgatgtaacctgtctaggagatcatcaacatatcctggagcaggccatagacaactctctctacattgggtcgtccctaaagcctttagaaaacagaccccactccatcgttacagagaaaactcggggctcaattgagcagcaaaattgtcagtttcctgcaacatcagtgtcattcaagaagtatttctcgaaattatgaataattcaatgtaagtgaacacattgtaatcacatagtacagatcaacctatgcaggctatggggacaatgccaaaaaagtcacttaaaatattgttgagaaaacagtactaatggacctcaacatgtgagtacatggtagctgtatttatcagacacttaaaacttgtagcaaattctggctgtagcatggagatattgacaaacacttaggcttgtcattcttactgtcggtctttgggtttactgtcttatttaagaagtcctgctcctcctctcccttctgtcttcctccctagatggcacaaatagtcttcaaaatttttctaatatttaaagttttattttactatagtttggtctttagcaagtctagaatttttttatatttgaaatgaggatctgattttatttccttctagaagtgaattactgattatgtcagcttcatttactaaataaactattttgtctcttcccattgagaacagactgactgttgctatcccattatatgtatacatgaatggacaaaataggcagcagaagagaatagcaaatccaaaactatgtgtgtatattatatattatatataaatttcatatattatatataaatataattatatattatgtataaatataattatatattatatataaatataattatatattatatataaatttcatatagtatatataaatataattatattatatataaatttcatatattatatataaatataagtatatattatatataaatttcatatagtatatataaatataattatatattatatatacatttcatatgtatatataaatataattatatgttatataaacattttacatattatatataaatataattataaattatatgtttattatatacatttttattttaaaaattttgtatatgcatacatatacacatatttatctctacaaaataagtctttggattctttatgcttttccacgcactagtttgtccattactgtgtcaatatcatgtcgttttacattcatctttaaaatctattttggaaagttcactctatttttttttcttgacaagtatgtcttcttccataggaactaaaaagttattttgtaaagttccagaatcatctcattggggtttgagactgtcattacattacatttataatgtaggaaggacttagttctttgaatttgaaagttttcaataaatctcttttatcaagtcttgttcttgaaatttttatagttttataatttatatagatactatacctttctcatcatatttataaccaagtataattcaatcaagtttttaccttttctgtttctaattagcttcttgtataggaaaaaactggcttttacatatttatgttatatagaaccatcttgccaaattttttattagtaataacttttttgttagtacaatgtccactttcttaggtatgcagccttgtaatcctcaaataagaattttcaaatttcctcatttctgctatttaagttacatatttagttttcttattgtattagttagaacctctatagtgtgttgaattacaataatgttgccatccatcacctttttgtagttccttgttttcataagaatgacttaggatttcactattccatatgatgcttgcaatatgattttggcaaatagtctttttcgtgtttagcatttttttcttttcatattttactgggagttttgctgctgaatcttagtaagtgcctgtttattatatatttaaataatcatataatttgtaccatttaatttgacataaaaattatattagacctgctaatgatgatccaaccttggatctctaaaattaatcttatttggtcataggtatagcttgtaattgttttagtacattttaaaatttaattttctaagaggtattttaattataatttttacatctgcattgatttgtgattttggtttataatttccttttttgttagttcagggttttgtgtgtagactatgctggcctcttaaaaatgaactctctatagtctgtaaatattagactaacatagaatttatttgttatatgattaataagtaaaactacaagtgtaaaaccatctgggcatggtgactttttagaaagcagacttccggtttagttcatctttgatcagatcaattttctcgtccaaccgtgatcaattttgagaacttacattttcccaggaaatcacccattttcttaaaattttctaatgtattgcccctgaatgtgacacaaatttgttttctttatgtttcagtcacatttgccaaatatttgactattttattaactattctaaggaattacctcttgcttttacttatttttctttcactttttttattgttttttaaaatactggctttttagcttcatagcaagactatggtaaggtgaacgaggcactctccttgggcacagaattgaaggaagtgccaaaaaactcagtaatcaagataatttctattttaatgcaatactttaaaaaaatcaaacctaaagcccccaaaaaaccctgatggattaaaattttcagtaaagatcagatctgtattactgttttttccttttgcttcagctccaatatggcttagcacagcactgctcctgctccttggttcatttattttaagggttggggaaaaaaaaaaaaacaccttccaagtctagaatttgcagaccagtctatgtcctctgtgactaggaaacttctctttagtaaactttggtgaaatctgttatctttcttttggtgaatacttattaaaaattttttttatataaagcactaccagtgatggatacaaagatgtccctaaaagtttacattctagaaagaaaaaatatatacaaatgtgaaaagtttagttgacattagagagggaaaaaaattagagaaaaacattatctggcagataatatcaggcttacagttttattgctcttggaataactcttaaaatccaccaggtggtggagtaaaatgaattaacagtgccatttagcttacatattttcctagttggagatgtaattttacagagaaagccacaattacatatccacatattttagcttatttatgaattttctattatatctttaatttttacaaagcagaatgtatgtgttgaaagattaaacatttttagccatctgatagccttctcatgcaagtcactgtataaacaaacaaaaaaagcagtctggtttaaaataggtccaggaatataatttaaaacagaagaaaaaatccagaggcaaactcccctaaaagatgattatattaagcctgcaaattttagtaaaagaatgaggctctaatattaggcatcttagctagaattagtactgtccaaaaggttaagattattggattctctttcatatagttcttgtgtgacctacttttctcctacccagagatttttcaaatcagataaattgatctgaatgtctgtataattcacttttcatgtatatatttattcattattaatatgacagtaatcttgtgtgtattaaaacacataaaaatgatatttaatatgaattaaaatttaggttcaaatgacttgccttaagtcataaaattaatcagtagtcaaactatcatgagatctggagttcctctaagtcctgcttttcatcatgctccactatctaacaatgtcatcagatgatgaagatgaatttagacagtcagttagcaacctatgttgacatatcaagaactgcagaatcctaaaaagaaataaaagattgaatgactgtccctgaggaatttacaatctaatgggattgaccctataggaataattatactttaccactcataaaaatatatataatgaaaatcatttaaacaaatatataaccatatattatagatcaaaacagtaccttaaacaaaaactgggtgcatttaattcaatttgtaaatatctgagtacctactagatgcagcatactaaaatacttttttcttaatgagtttataatctaattatatgacctagtttagattaattggcccaccgtagcttacaaaaaaagtgtttaataatgtagcatattttatttctaaattagattttcaaagataaaaatgtagcacaataacctaatattaaattacaaacattaagccaattaccattaccaataagtggtaggtttgagatttttccacttttgaaaaagaaaaagaatttggtatgttatctggtaaactaccgcaaggcagtttttttgctgcccttatcttttggaactcaatcgcatggaaggctcaataactatttgttgcactgaaaaacatttgccctctttccccacaaagtctcataattttttatttttgtgtagctgctgctgtcttgcctctatttcccagtctcctcttccatctccccttcacagctcttctcttcatgccctggctttgagcagtctcacccattgtcacagttgcagttgactcctaaaccaacgtctgtaaacttgacctttgtgactccagcatttctaactaaactctaaacatttctttctcgctattagtattccaccttaaactcagccactgaaatcaactcaacatcttgctctttaaaaactagcatagtcttccaacactctatttctatcagtataaaaagggttggctgggcaccgtggcccacgcctgtaatcccatcactttgggaggctgaggcgggcaggtcacgaggtcaggaggtcgagatcatcctggcaaacacagtgaaaccacgtctctactaaaaatacaaaaatttagcctgacatggtggcaggcccctgtagtcccagctacttgggaggctgagacaggagaatggtgtgaacctgggaggcggagcttgcagtgagccgagatcagccactgcacttcagcctgggtgacagagtgaggctccgtctcaaaaaaaaaaaaaggtttgacatgtacagttatgcaggttgtgctctgagcaaaagcacttggctgaggggtgagtgggggctaaaactagactctattcacaggcagtacacttggacacagagctgtgtcagcattagggaaatcttttcagcacttcctccacccaaagaggatatctttgtctaactcacacaaaggtggcatatgtattattagtatcaccaccatttcctccaactcacctatttcagaaactcagaatctccattctttctcccctcttttaggcccccataacatgactacattcaccactttcttttcatccacactgccaaggagaccggagcagcccaacgcttcatccctgcactgtttaaatggcctctttgtttaactcttcctctgctcctgtctttccttcaccctccagtagattacccttccttaaagcacagttttgtcttgtcatttacctgcccagaaacttcatggttctgagtgctgtctgtattactagaaacaaacttctcagactaccattcttcaaccagccagggtctaaaatatttatgatgccttgctgtaccttgtgaacactcagtacatatttgttgaatcattaaatttaagattgcccaccatacctttccaatgctaacttccacctaagtccaactagtcaccctcatgtaacctaggtaacattgtgaactgctgatatttacagaactccttcctaattatcctatcttcataaccttggtgttgctggttcattcacatggggcattggccacacctaaccttccaaagcctattcctggaactcctgtctatagagtttccttgtcttgtgcctatgcttgtcctttcttttagactgaatgccgcatgtattatggcttacttgtgttcttttcttcttttaacatcaacctaggcttgctcctctcactagatgttaagcttcttgaggttagcacgtctttcttgtttgtatttgcctcctcataagccccagattcaatgaggaatgtttagataataaatatttgttgaattgaaaaccatcacccagttgtacatatgcccaaaagacggattgactagccatttgacttttcaggtgaaaggtaccgttgcataatatggaaaagaaaagataccatctcgaagattgttgtttttaaatgtttttcctgacagcaactagactataagaagagccaactttgttactattgggtttaatatatgaaacgtacaattaaagtaactcactccacattgtgttttggtagagagacactgaattccaggagcatgaaaagattctgtctccggattttctttcagttgcccaaatcactgatttgttaatggaggacatcgatggagttcaagagtaagcacttcactattacaatcacatgtagaagaacagttcgagttctgcatctgtaaatgattgtgattacatgtataagcttttttcacaatatttgttatgatattatgcactgaaaaatatctagacttcaaaacacaaaaattctcaagtaactgacttttggcactactcaacagtctcctttataaagaaaatacactgcaaaccaacttactaatatttaccaagagcagaggtttgttgataaaagcaggctatagcatatgctgtcttcttttctctttcattcataaaactgtcaatatgcacattaacttaaagaatgttctccctcgttgtaagaagagtaagttgtgttttctgtaattataatgggcaatgcattttattattttggaaatcttgagtatttgccatccacctgtgattctcatcagaaataatgctatactaagtactctgattgtgtacatgttacttaaaaatgtgaatacaatggaatttataggcagtaattccaatatatgtacatctcactctttaggccatttatttctatagtagatcatctatttagaatttttgtcagatacatccaacaacataatatcctaaaaggtgtttttagtaatcacccatttaaaaaatcatcccacttagaatggaagcctaattggccatcgtgtgtagagagtggggatgatgtcatgcactagcatcttggtgtcagttctctgcaggccagtccttgggacacaaacagggtgtcgtggaccataacagacaaatagaaaatgactctgtcagtggttatcactgacaaatcttacaaatgttatagcataaagatgactcactactgagaagggaatatgacagatgtcctggctggaagaaaaatccgagaagggaaggtttatcaagaacaggtgaataacactgacaggccttttcctgagctgctcagctctagcgctggcaacctctgctggaaattgattatctgtgatcagccataccacttactatctgcatctctacaagtatgagtgaatttaaaatttcagagatttttaagcaagtatctcctgatgattttaccatttttatagaaattaaggttcgttaggaattctgattcttaatgtaagaattgatctgcaataccactgatcatgtctttatgtaaaatgttattttccatttccaggtaaccccaaatgttattgatcattgcaatgcaaaacaataggtatttgatactaggcaaaatagcacaatgcgaatagcagacattttatacagttcttaatttatttatattaaatgtcaagtaaaagatattatattaaatacaattaatattaaataaaaggtgttgcaaataagtgcttttcagaattatttcttcccacgttgtaaattgtgctgtgtatcatactttgtgtgatgattttttaaaattattggctctctttgttgttgaatatctaaattctgaacatatttttaatctttaggtggtaaggcctaggatacagtaagtgatacagaaggtgatgcagaagttagcaatataaaaacagccaggctcaatagcaggttgacctttttagactgtctcattaatgtagaaatcacctgaagtgacctcaaattttaagacatcatctttggataaataacatcagtattatgttaggagccatttctttgtaaaacaattttcttgagattctttacatgattttcgtaatggtaatcctgaaatatttgcaatcggtcactcactttcaatttaaaatagcattattataaatgggggttatatgctttcaaaatgacagaaatatagtttaagtatcctatcaccaagtgacagaaaatcatagagtctacaaagttataagcctatttaaataagttagaagaaatcagcacatttccctacctcttaaaattaaaaatttctctccatgaaagcagccaacaaaatgaaacattaaagtatcattaaaacatatttctgaaattcactttaagcagttaaatgtctgggtacatttctcatgatcacttagctgctatcaatcataaatattttaatgtaaccttgactttatttatagatccatctcaattttttttaaaaaagaataaggactaaaatgaaagtaactatataaacacaaaaataacactgagacatttttaataacctttcggtaactgggcctccatgagctatttagctcttgccttgaggtttatttctgcatgtcatatttaagaattaaaatgcaccccattgtcaagaacatgcaagagtaatgtaatatttttacccaaattcttggtgagacaaaatagataggtatatcacctatcatcactataccaaacttcctaaaacacagtgaatcatctttctctttccctacgttctttcatgctaccgccatagccatctctcccctctcccctgttccagctcccgttattcccagagaaaaagtttacgtatttgccagtaaaatactggaaactttgcattcaaaccatagcaatatcttccttcagatgcctccctacataatctcctttggagtacaatgaccgagcaaagaatggaaatgataaatccttagccctgtggttcaagttaaaagggaagagacaaatggtattagggaaagtggtggaggaagtgtgggggacagcaaagatgaaaaaggtcaaagagatttcaccaaaatattttttggcaagtagttactgtcattcaaacacaactaaacattgaaaagtaaaaataaaaagcaaagaacatatgcaaatattcagggcaaatatttaattaaaaatacgtagtgtgcagatggcagatgatgagtacaattagaaggaaaactaactgctagaaacagaagaaaatgttagattaaagctaataattaaagagggcatcaatttcacaaaacaagagaccaaaaaaaaaacatggtaaaatatataaagaagaagcttttagaactaaggcaagaaactaaggctaagagtaaaaccagtgtagaacttacattgctgaaaatcaagtcagtaatgtggaagacaaatttaagaaaacttacataaagtgtagattaaagcaattattcaaaaaagttagaatatacattcaacatagtgaatcagaaaaaatagtctacacttcataaaactttgattttaatattttaatagaataaaacctgctaaatttttgtgggataaatttaaagcaagtcacctaaacaggaaaataacaggcctcagacttttccttagcaaggttagtctgcaaaaatcagtggtgcaacaagtaaccaaaatgtaggaagtcaaaagtatatgattgcaaaataaaatactaattttgtctgatgttcagttatagtggcaacaagacattgcaatatagagaacaactcagaaaatacagtattcatgtggtcttattgaaaaatttatttcataacccagctgaaaaataaatcagttcattggtgaattttaaacaacaaaaaactgccaatgagaaattgtgatataagaagcctggcagtaagtatggatcatttaaaattaaaattaaatccaatatggtaataatagactgaaacaattattctagaacatcaacaaaaataggcaagcacatgagaaaaaaagtaattgaatttccttttctcaccaaaataaaattgaattgaagcagatgacccctatttatagtaatgctatttaaaattgaaagtgagtgattgcaaatactttaggattagtgttacaaaaatcatataatcacaagaaaattgctttaagaaatggctcataacaaaatgcttttaaaaacttgtatcataaatgtaaagggttaatatccctaagtatgtgaaaaacttttataaacttaaaagaaaaagtaacctatagaggacattaaaaagaaatccaatctaatgaataagcaaagaaatatataagatagtaattttcagccgggcgtggtggctcatgcctttaaacccagcactttgggaggctgaggcaggcggatcatgaggtcaggagatcgagaccatcctggctaacacggtgaaaccccatctctactaaaaatacaaaaaaaatttagccgagcgtggtggcaggtgcctgtagtcccagctattcaggaggctgagacaggagaatggcatgaacccgggaggcagagcttgcagtgagccgggatggagccactgcactccagcctgggcaaaaagagtgagactctgtctcaaaaaataataataataataataataataaatttttctgttagattagtagatgttaagattatggacaaaatccaacgtagattggagtatagagaagtggacctttctgtgtggtcttgatgaaagacttacttggcactgcctttctggagggaagtttagcagcatatctcaccatggccaatataacccagcagtcccaattttaggaatttattgcaaaagataattggagttttggaaagatcttaattgatcatttctctttactttagattcttaaccaatggaggacatcaaagcccatgtgggaatacatatttctgatctattattaactgtatttagacctctctcctattgataagacttaagaatgtatgaaggcttcctatttctccttctttaccgaatactaatcctttttcagttatgttcattaccattttttttcccagtctgcagcttgtcttttctttttctttttttttattatactttaagttttagggtacatgtgcacaacgtgcaggattgttacatatgtatacatgtgccatgttggtgtgctgcacccattaactcatcatttaacgttaggtctacctcctaatgctatccctccccactcccccaaccccacaacaggccccagtgtgtgatgttctccttcccgtgtccatgtgttctctttgttcaattcccacctgtgagtgagaacatgcggtgtttggttttttgggtgtttttttttttttttttttttttttgtccttgcagcttgtcttttcaatgtagttagattgtctctggttctccagaagtgtttcgtctgtttaacaaggaccaatttattagtctttttctttatggtttgtatctttttggtgtcacttttaagaaactttgggctatccaaatgtcagaagtatatttttttaattaaagtttgtaatgtttgctattgccatttaaatctttaaccctggattttattttaatgtattatgtgggatggtattttattttattttccatttggataaccaattctcccagcaccatttttgaagaatttatacttcctctactgatttggaataatacctctgccatataccaggctccctcatatattgggtctgtttctggactttctgcgtattccactggcctacttatttatcccataacaataccacaagttttcattattgtggcagttttcttactgactttcacttaagagtgaatgatactgtagattaaacattgagaaatatatcttgccaaatgatgtccagtgcaaattaaagatccctggctaatagagtaaaatcctaccaccaccatcatcaggatgtctatatctgccagttgaggtgaatgcctgaaaaaatgtgtcaaaatgtatagtgacatgcaacataaaaaactgaccatattgacctaaaaattaaaaatacacaatgttcacatatatatatatatgacataacaggaaattcagagatagattaacttcaaagttaatggagtcaaggtctaaatagtatcatcaaaaaataaggcttaatcttagaacccatttttcttagggttacaagataactggcggtagcaactaaagccacttattcactctttcttatttttattcaacagaaaaaaagaaactgcatcctctgttatgaattatttataataatttaggagcaggcccatcatagaacaataattattattgagacatgccatataccaaatggcattatggcaagggggtgaagttagtatgattagcttagaataatcagaactcacttttgggtttcaggtctaccctgacaccactgtagatgaaatgcatgttgaagaaatagacctatctcgacctcagctttatttgttcccaaacttgttcaatcttgctgtatttattaatctgattatatcacttattttgatgttaagaataataaggacttccatttttgaagacagcagtaaaaagttgtcacacacatattacccctctcaaaatcacataaaaccaacaaggaaataccaccttcatctttgtcaaaaccaagagaatgctaatggtccaaaccacaaaatataaagatgatggccactgtcattatagatcaaccagaagggcaggagaaaatataaggaaggatgctcatagtcacagagcttagaatgagcttatatctatatctatatctatatctatatctatatctatatctatttctatctatatctatatctatctatctatctgcttaatctcccaggaggggaaaccttaaagtaccattccaggaacccttgtctgcaatagcaggaccagggtgtgcaggcttggagcagatcctttctgtagcacaggaaattgactgtttatatgataataaagagagtctattcattcttttctttctttttccttaccaattaaaaaaaataaataaatgctagaataattgacacaaagttacttcatacagaaaatgcctgctagtttgtaacttggccaggtctccacctccagtgtatttcccgaaagtaggtattcaaggacaaaaactcccttcatccaaagataaggtggtaaacaaagaatatgcattccaggacactgcaagaaaaaataggagaggaacaggaaagagaaatagcaaatcaaacacatcagaaagatataaccatgagaagacaaaaaatataatcaactattttatcatgaattttaaaacatatgaagcaactacagaaagcatacaacagagatataaaagctcaaggaagagataaagaaataaaagattataaaacagtatccaaaatgaaaagaaaatagacttgaaaaaattttaaggttgaagagaaaattataactctagaaaaaatgactaaaatgtacataattggaatgctttttaaaatatagcagaatgaactgggtgcggtgttcacgcctgtaatcccagcactttgagaggccaaggcgggcagatcacttgagatcaggagttcgagaccagccttgccaacatggtgaaaccccgtctctactaaaaatacaaaaaattagtctggcatggtggcgggtacctgtaattccagttactctggaggctgaggaagaagaatcgcttgaactggagaggcagcggttgcagtgagccaagatcacacaactgcactcagcctggccgatgaagcaaggccctgtctcaaaaaatatatatatatatatatatttatatacatataacatatataatatatatatttatatacatataacatataatatatatatttatatatataacatatataatatatatttatatattaacatatataatatattttatatataacatatataatatatatttatatatataacatattatatgttatattatgttatatataacatattatatgttatattatgttatatataacatataatatatatttgtatatatatatttgtatatatatataacatatgttatacagaatattttcagaaataaaagaaacttaattttataaatgaaaaaagatgttgaatttcacagaaaaatatactagtaaaattgctatacataaacagggaagaaagaaggggaaggggagagaaggaggagaaacagaaaataaagaggaagaggaggaaggagaccagaaatagagtttgctcccccatcctcgttctctctctctctgtttcttttttgaatgtcattttggtcttatgaagcttgatgtaactgaatattttcagattatgggcattatagaattttcattaaagaaaaagacctgttttcaaaacttaggaaagaaatggttcaatatctaatctgaattaatatgtggatttttgttttattttacagaaaactgagaatatttttgaatttcaaaaaccttgaaacttgtttaaaggatgccattctactagattattatgtatctggatttttgtgggctagaggaatggatttctctattattcagtattcaaaatttatgactttactagctatgtcacttcaaaatcttaaaagtaagtacactattttcctttgaagtaaaacaaatttaatttaccatataaattgaggttcttaagcaaaagttacagattttattgtaattcctttaatgaaaaatacgggtttttcctgagtataacaaatacatagttcctatctccattgagttataaaacctcaagtaatacttaacaaaggctacagttttcataatagccaatttgccaaatatatgttaatttcattttaaagttgtatcagtggcatccaccctctaaatatctgaggactctgtggtattcttgtgaaatttttgtaaatttaaaactacactaaaattaaaagtttatcagtaactattagctatctctaaaatagaatattaggcagctataacaaggagaaaatgaagaaactttctgtgtactgtatgggaaacaatatatagttatcaagtaaagcaaggtgcagaactacatgcttttatttataaaagaagcaaaaataagaatctatccatattttcatttgtgtatacacaaagaaatgctggaagatacagaaaaaaaataataatcaaaattccctggggtgaatggtagtaagaactgggcatgtgggcaacagatattggaggaagtcttttcacaagatttcttcgtacgtatttttgaaatatgaatacatcacttatgcaaaaattaaattttaaaagagaatatgtaacatggacagtcctaagctttggcgacttctgagctgagtattcacacactagaaatagaataaaggaaagtaaaaattttcatggacctcacatcccaaatttgagaagatatttcttttttaaacttttcctgtaacttataactgactcagtaacatttcttctatgtgaaactttatattgttgatattattgcaaaaatgaatttctaaaacctgagcaggatccatccaactcctcataaactatgagagagaaagtacatatgtagaacctaaccagaaaaaaagcaaggaatctagtttttcctcctggcagaaaaaattttttttaaaaatccctccacacttttaaactgaacaaacttatagtcatcattaggaaagaatgtaattttaaccaaatgtgccaaggaaaaaggtgaagtatgtttacacttcaactaggtagcagtagactcctgagcacgtagccaggtccataggcctagatggatccccctggtgtatgatgtgaatgttagcaagtaactgtagaatattttttatttcttatgatgctaaattggttttcccctcaataggaatagcaaattcaggtaacatttatgtagattaacttatgccagtcatagtgctatttgcattaaaaatattgtcatgtttaattcacatgccagcttatgagagaaattgataagagtcagaggagttcagtgactccttaaggacacacagggtctacactagcaagtgagggcccatcttcttgaatacgacatcaaatgtgctggctttgggctaaatctagaaagcactatacacatgtaatagtaccaggagttagtttcacatgaatttctttttttttttttttaagacagattgtcactctgccacttggccacgctggagtgcagtggtgtgatctttgctcactgcaacctccgcctcctggattcaagcgattctcctgcctcagccttccaagtagctgggactacaggcatgcgctaccacgcccagctaatttttgtatttttagtacagacggggtttcgccatgttggcctggctggtcttgaactcctcagctcaggtgatctgcccgcctcagcttcccaaagtgctaggattacaggcattagccactgtgcccggccatgaattccttatttaatcctcccaacagcactataattttgaaaataggtattgcagtattctcattttacatagaaagaaagtgaggccaggtgtagtggctcatacctgtaatcccagcactttaggaggccaaggcaagaggagcatttgaggccaggagtccaagactagcctgggcaacatggagaaaccccatatctaaaaaaaaattgaaaaattaactgggtatggtggcccacatctgtggtctcagctacttgggatgctgaagtgggagaatcgcttgagcccaggaggctgaggctgcagtgacccatgattgcatcactgcattccagcctgggcaacacagcaagatgctgtctccaaaaataaataaataaaaagagactcaggtcacctaactactaataataaaggtcagttatgaggtatcatcctacattttccaattaattataagtctagtatgttctttcattactctaagttttcaagaatacattttatttctagaagcttttactatttgagtggcttaatcttttatattttaatcacatcactaaatgtgatttttaaaaaagcaaatatttcagttagataaatgaaattattacttccctaatttttaaagcaattatctacagaaagacattagacatagaaaaacagttttaaagattcaactattttcagaaggaaatagtcatataaatgtatttttgtttgataagtataatttcatctggaattataatcaattatctaagaatttctcttttctctgcatctctaattaatatcattttattaataaaataattcagattttccattcatttatgaattgcttttatccaacagatttttcatttctgaagctacttccactattatcaaaagaagtttatcatggagagagaaatgtacaataataattgaattccacttagaatgatataggaaaacctagttatccagaaataattcagtgtatctgacatacataaaagatgatctggagggaggcaatgggaaacgaaccaattgtaattcattaaaccagattttaattgttttatgtagttttatgcttctttctaattcctataagtagataagaagctatactaaacaaattacaagttagtgtttatagtgtcttcctaacattttaaattactttactttcaccttattagtaattttggtatttagggtagagcacttacaccccagtgggaaagagtagctgtgtaatccagaaatacctggtccagcaatcagcctgtgttctcataactgttttaaatctccacccattcccttccaaatcaacattacaacaagtgtaatgttgactgatggtttcagagagagacagagatttggatggtggggtccacattgagcagcacaattcccccagatcccacattcaggccccccactgacattcatctcccccaggcggcctgtccagcctggctttagtatctttctactctccacctccagtatcctctgtcttatgtccacacacccatcgcttttccgcaaacataggacaccctggccagtccacttacctgactccatcttccaggggaagggtggatagtgtgtgtgtgggttgtaaataatgttttatctgtcacaagtaacactgagcataacagaaccaaacgagaaaagaaaatggaattatatttttattacagacattttaaaagttaagtctaaggtgttctttttcaactgacaaatgccacagaagacggtttcgggtgtttgttttcattggtgtgtagctgtgaaagaatagatgagaaatcactgagctctttacttcttagtggtggccaggttgtgtcactctttgtgcattttcatcgggctctcaccagcaccactgggcagatatttgagaaacagcttacatgagttataagtctgtggctgtggaaaagaaaaaaaaacttgatgttttacataaaaatccatatttctgacttccattgaaaatcttcagacccagatttacacatggaaacaattggctaaagcccagtgttgattgactccattcatttacattttcagctctaagttcagctctgctgtctagtaactgaacctcccatctaagtcttccattcctcaccagctgtcaaacatctttttttgcagttttcatgcttttattctgagactgtagaaaaaagaaaaaacaaatgcttttcattttaaagaaagattttaaagtacattttgaattttttttcttttttttcatcctaaaatggaaacataaactctgcagacaattgtgtagcattgtagtaatttacaaatgttggcgcagggtcagcgctattcctgagacagagtctcactgtgtcacccaggctggagtgcagtggcaccatcccagttcactgcaacctctgcctcccaggctcaagccatcctcccaactcagccccccaagtagctgggaccacgggcatgtgtcaccatgcctggctaatttttggatttttttgtagagacagggtttcgccatgttgccttggctggtactctaactcatgggctcaagtgatccacccaccttggcctcccaaagtgctgggattacaggcttgagccaccgtgcccagccagcttctattcttttgcataaaacgtattaatttattatgaagaaacaagagttttaccatttatcctcacaaatacttaacaaagtaaattttggcacattgaaaacatcttggattatcttattctgaaaacatctatcaaaataataattaagatttctctggattttatttcagcactacatatgtccttagaggaaagcataaaatggcttggagaagttatggctgaaataggaccaacacattcgcaaaagagtgaggactggaatatctttgatgtaaaacaagccaatgctatcattgattacttaaaaatcaggtatggattattttcagtaacatttatttttcatttcacatcttctggaaaatgtctgttaagtaaaaagtaattcagtttttagcagattcagatatttacagaatttatgccataattagcccaaccaataattaggtacttaaatcttctttaaattaagtgttcaaatctttcacctaataactaaaagtcagaacagtgaacagtttggctaactttgcattcccaaaaaaaaaggtttgcgtttgataaatataattttatctagaattgaaataaattaagaatttcatttttctttgcatctttaattaatatttattaataggatgattcacattaatcagctgcaattataatagactctatgttttaggtagttgatctttccaactacctaattctacattttgaagagcaacattcattgctatttaaatatttgttttgaatgcttcgtattagaaattgaagagatttatgaatatacttcctcaaatttattacatcccctgaaatatcttgtagtattgaccaattaaactcattaagtctttcttactacttagaaaataatggtgtgtggaagtaaagtatttttattacagtgattcttcattggtgaactaagaaatttgtctttttatataatctgtcacaaggtctgcagtagagtcatgcatctctctaaagggacatttttagggtttgcaaatattcaaacaagagtaggttaaaatcttttgtcaagctgaaagcttctgcataatatttttgttcctcttgtactatatactccagtgtttttcaactttaaaatttaaaattctaaaataagagtgctgactgatatcttagacatgctcatgatttgcttggcaaggattctagctgaaatctagaaagctttttaaatcctagtaggtttaatatgataaagtttatatattggtttgtggtatgaattaataatgtcatatgatatactatggtttttacgtaataacatttaaaacaatgtggtttcttaatattaaaacgtagctcctaaggggtatctctcaataaaagccagagtagttttcatatcaattaaagcaaagcaaggtccttgtgttgggggagacgacggtaatccaaaattggaggagagcctattcctcaaggtctttctacccatcagggtttgagaatcactgggcagaggaattctactttgcacattgtattagcatccttattttccttctctatttgaacagtcccagtttctcttgcagaacacatttttacaactgagctctaagcccaggaggtttctaatgggcacagggactgatagttgacaagggccacaaaacccatgcaggtgccataatgaccccttctggaaggtgaaggatgacagctcttttccccttcatctcgtctctctgggcaaatgttcatctacatatttcttgacattgtccttcagaaaacaattaagttaagaggggctgtccatgttagtcacctttagattctaaccagggtaatttcacatattataaatccctaatattattacttcactaaaaataaaacaaaaagtagtatttaagaaattagtcaaagtaaatcacagcaattgttgatgctgttaagtcgtcatattgttatttcaaagaaattatgcaatttaaatatccctattacagaactataaaatatcagttagtaggatatctggaattgagtctgcagttgtataaaagaaaatatgctttcctacaacacctgttcagaacccctcaaaggtccacaaatgaaagtttagcggggactgagaggaggggcagcatcaagaagaatacctaatagatgctgggctaaatacctaaatgataggttgatctctgcagcaaaccaccatggcacccgtttaaacctacccatcctgcacatgtacccttaaagttaaaagttgaaggaaaaaaaacagtttaatgacaatgaaatcacataatatttttcattttgatgactacaaagcagttttataaatatgaaggtaacccagttatcaaaagtataagtgtttgaatttaacccgatattaagtttacccaaccactaaaagccctagtcaattttgggagagcagtttttagaacatgacccataccacatgaaacttaactgacaataaaatggaaatttcatttgatgcccttaacacactctgtcatgtgtctgtgatttgaaaaaaactaataccaaatttcctcccccacatgactgtaagtactggcaaatctagttgtacatttttacagtgtattgtatcatgtatacaaatataaatacttctgcagctttttagtataaaacatcatttacatatatacggcccaaatacacgtctgccgttgtggattctacctatttttgggaattaggcgatagtaatctcaggtgtacactcaatataagaggcatatacccaaaataagaaaatcaaccctgccgctctgtaaaccacagggtattgcacttccaggcatcaagccagacatcttgaattattttcacttcatctctcttcaatttaggactaagactaaatgtttgacaaaataatctaggaagttgagtcagtcagaagcagaagaaaatgcattatcgcagctgaagtgtcactttgttcccatgtagcaccacctaatcgctcctggtaaagctggacaaggccctagtcctggccttgcccccaagcctgcagctttgaccaccgcatacaaatcatgcatttcgttttcagtgttaagaagtgaatttccctcttggcatgggacaacctaattcctatatgcaattaaaagaataaggctgaaagattatgaaatttcaggaaagaagatttatgaactaagttctttgtgtgatgcaagatggagaaagggaaattttatgccggttcactgagaggaagccaagctgtttccaaaatactctatagtctttaatttttctacttaaaatcagttattgccagtctaatattttttatcttaaggctttctctaggtaaccagcgtaagttagggagagtttgaatttattttgcatcattgaattatcagacttcactaatcttgatgtatttttctagccaacaaatcaaagtactgtcaaaagctaagttacttttctgaatgttgatgagtaatttgaatgtacaagaggtttttttcccccaaaataccatgacagactctgcacacccatcactttttaatggattgtgttagtagtgagatcaactgctaatataactcagagagactcagctgccggaggatttcttcattgatttcaaatgaattgaaactttgatccattacaacatccaggagaagccattattatacatgctctgtagctacattttgcaaatgttaatttctcagttatattaaaatcaatttccttaaatagcaaaaggcaccagagtgaaagagaaaccactaagacaattttttgttcttgggcattttgctgtattatgagtctattaattttctcaaccagcaggaagagaactagaaaaattcaaatattatcacaaacaggatattagaagtcagcccttcagtaaatttttaactcttaataatgcattgctccttaaacttactagaatacttgttttaaggacctcctatcctttggttctttatagtttttgtatgctgaccacctagtctttagggtaagaactgaagaaatgatctttcttaaattaatttttccctttcatgtatgaccgaatattctgcagaaaactcagacattttctaaatggattttagttcatgcgccatttttcaggtattattatagattaatttaatcttgaaacagtttgagaatgtgagaagtaattgacatagaggtagattatataattcagtgccatttgtaccagaggaaattgactcctgtttgcagcaaaagagcaaataatgtaaagtttcatgttatttagtaatggtgcattatttgcttttaagctaggaaaagtcaagatgccatctaatttctcccttattcctaacttacccactcattacagatggatttactgatattattctaggtactatgttatattgtcctttccttaaagaataaaactcttaatttcttagtatttcccgacaatttcttttggaataaaggaggatgctaagtctgttttagtgtctgatagcattagtttggtcaatatgaagtttcctttaataaatgtctttacatattgtgttttttttcctgaaatcaacttatcagagtgcacatttattttatatttcagcttatttcaacactacaagctatacgagtttatgttctactctgccagggaagaaattgtgataggaactgaggtaagtaatttatctagatggaacaagttaagcagaatcacttaatgcatgctgatcagcatctggatctttaactgcttaaagcaacttcttgtcaagattattcaagtgttaatataatcaactcgtagtttgcaaaaagaataattatataaagtgatcgttgcattaggaaaataagtggtcttttggcattaaaagcattgttaatcatttatactttgtgtatttatggattatttgacaaagttcaattggataaggtacatatgtcttcatacaaataaaatcagaaaaaaacaactagtaatttgcaaaaaagaataattatataaagtaaaggtaatggtaactcagtgaaatcccttctaatttcacattttttttcattctactcattgtttaagacctaatttagatcccacttcctcagtggatcaaacctaccttaattgcatcataatctcaaacaaaaggtttagacaaactctctaatcaatcctgttattgtgtgccaaatgatctcttattgctgaatttgggctactgttgcaccaataagcatatcaatattcactgtgttatatggtttcctaattgtttcctgtgggttgatatagttactacaactcaacagtaattttcttgaagacaaggatatctgctgcttttctactacagcatatagtataatgtaggatacagtaacccctcaattaatactacataaacaatttagtgcataggacagcagttctacaatgaaaggtctatctggagacactttcaaacaaacttacttataatcacatatttgtaattcctagaaatgaattctgagtaggaaaacatgtttttactttattttgttttattttattttttattatactttaagttctgggatacatgtgcagaacgtgcaggtttgttacataggtatacacatgccatggtggtttgctgcacccatcaacccgtcatttacattaggtatttctcctaatactatccctccccttgccccccactccccaacaggccccagtgtgtgatgttcccctccctgtgcccatgtgttctcattgttcaactcccacttatgagtgagaacatgcggtgttcggttctctgttcctgtgttagtttgctgagaatgatggtttccagcttcatccatgtccctgcaaaggacatgaactcatccttttttatggctgcatagtattccatggtgtatatgtgccacattttctttatccagtctatcattgatgggcatttgggttggtttcaagtctttgctattgtgaatactgcttcaataaacatatgtgtacatgtatctttatagtagaatgatttataatcctttgggtatatacctagtaatgggattgctgggtcaaatagtatttctggttctagatccttgaggaatcactatactgtcttccacaatggttgaactaatttacactcccaccaacactgtaaaagcgttcctgtttctccacatcctctccagcatctgttgtttcctgactttttaatgatcaccattttaactagtgtgagattgtatctcattgtgggtttgatttgcattcctctaatgaccagtgatgatgggcttcttttcatatgttcgttggccacataaatgtcttcttttgagaagtgtctgttcatatccttcacccgcttctggatggggttgcttgtttttttcttgtaaatttgtttaagttccttgtagattccaggaaatcattttaagaagactaaagatgccattaaagaaatagtgcttctgtaggtccacaattactttaaggggctttgttgcctcctagaagtaccagggacaggagtggccataatcagaaataaacagtgagtaacaggatattcacattatctttgtaattttcctgatattaagaaccacatggaacatgccagctattctgacttcctgggtattgttattctgggatttataaattacttgcttcataaacacctcagtcaccattactcactcttcatttgggtacttgttctaatgctagacttttaaaagtgaactgccagaaaacaaggaaccctttttgcttctgactttcataaaaattacttctttgcagtctcctcatactgtagcttaaattaggtgtcacttgacaaagtttcactgaaaaacgtttccatttcagaattacctcatatcgcgtgacagcccttgcaataattatcagtttggaatataatcctatctcatctattcaagcaaaactttgggaaaatgatagtggcttcaataacagcataagttgatattgagagtgatcaagaaaaaatttcagaaagaactcccttttcctttgttaattacacaatcatgcctttcttctatattgtaaggatatatttaggtgacatttatgctatggaaagataaagtggagaaagtagacaggcttggctgctttattttccattgtcatttgtattttccccaagctgaccagagcaataaaaaaaaatctttaagagaatgatactggggcttcaagaattaggccactcatggcattttaaaggattagtgaaagtattttatgacattttagaagtgtttgctaacccttggtacaaatacctgtttttaaattaacaacctttcatggaggaggtaggggcctgccccagcaatatgattattcatgctgatctcagggctctgggaccaaataatggccacaagacaaacatgaatgtttgaaatttaactcttaggcaagcattcaagttagataacactgatgaaatttagtttctttaattgtggatagatgagaaaaaaacataaatcccctctaatcaaagaagtgtccatttcataagtgaggaaagaatgatgaaatagaatatcaccatgtgtcaacctttaataaaataatagatctaggcaatgatgatgagtggctcctgacatcacaaaaagaaaaccagacatcactgctttttaataaaattatacaaaaccccatatatattgctcttgcaatttgaactggctggtcttttggtcagtcttctaaccctaacttctcatttgctggaaatacggaagataaaggaatattttaaggatatcacaaaaaggcaattagcaaaccagggtgtaggagattctatagggcagaagacatggaatattcaagaaataaattgcaaagaaataaaaaaaaataacaggtgaacctatagattaaaaaatgactgaatcaaattcaatgtaggtatcttatttggatcctactgcagacagacagatagaaaaaccaaaccacaaacacaaaacagttatgagataatcgaggcatatgaatattggccacatagttgatgattactgttactaatttctggaacttgttagtgtattactttacatggtaaaagggacttcgaggatttgattaagttaatgaatttgagatggagcgattattctagattactgaagtgggatcaatgtaatctccatataagagaaagaggaaagcaggaggatcagagtcagaaaaagggagatttgaaaatgtcacactgttggcctggaagatggaggaagaggccacaactttatcaactgtcttgttatctagtatggcaataccttctcatagttcgttttaatacttaattattattgtttatttttcttaaatatgaaatttagaaataaacctgtgcatacgtggatttttagtgtgtggcatatacaaagatttagtaaattggcatgtacaattacttgggataattggctatgtgtttgttaaaaagaaattagatttttaccttataccgaacttaaaaatgaatccaatttattaacagattcatttcccataatggaagacatattccataatggcaaactataatttggtcaacacttccactgagaacaactagaaaaattggacaagatttttttaagacttaaatgtttgaaagctcagctagcaaagctcaaaaaagattatgagcctgacactcagaaatgctttctatctatgggcatctacaagtttggaaaaggtggctaagagacttaaaagctgagaagtgaagctttggtagacacgtggagctaggagaacaaaaattggagggggaagagaatatagcaaattttgcaggtagcatgttgggtctgcacaagaccacgttttaggagatcagccctagctaccatggactgaacttcaattccaaatgttctccatttctggtggatttaggttggatgtgtatagtgttgttaacttcctctgtaaaataaaatcatgttacactccagattgtatcaacagtttttcataaccagtgtttgtcatataataaaaatcacacagaaaacaaaaatagaccacaagtgctccagatgatggagtaattagtcatgtgcttgaaaataattatccttaagaaataaaaaaatataaaatatataaattttagcagataaaaaaagattacaatattaaatggatgttctgtaatagaaaaatacaataaaaattaaaaaccaaatggatgtgtttaacaagttagtccataactgaagagaaaaattgataaagtggaagataaatcaaaaaaaaaaaatctaaaataaagcatggggatgcaaaagcatgataaacacagaaactgggtaagagagtatggatatagtaaaaggtataatgagagtacaaaagtcaattctagaatgagaagatagaagtcacatgtgaagcattaattttccagaactaaccaacaccagtaggacatagatttaggatttacttgaaccccaaatacatgtaaatctacaccaaacatattacttgaacccaaaatacatgtaaatccatacctaagcatattatagtaaaatttctaaaaatgaaagatgaagacaatcttaaaaccagccatagaaaacaaaagacatatgtcctttaaagaagtagcaataagactgacagtcaacttctcaacagtaataatgagagccagaggaccatgaagtaatttcaaattgtcctaagaaaataactgtcaatctagaacttcattccgagaaaaaaaccctttctgtgataaaataagaaaaaggcaaagaaggcaacagaaacatgggcaaagaatatgaacagacaatatgaggattttaatagagggatttttagattaaaaaaataagtacatttattacaaacagaaacacactaaaggaaatactaatgggtgctctccaggcataaagaaaatgattccaaacagaaagtgagagaaatagaaaggaatgaagagcaagtgaaacgggacagattaagatggatggatggatggatggatagatctatcgatgaatctaaataaatatcaaatgtgttgcacaaaatgttttgtgaggtttaaaatacacgatgacaatagcatataagttgacagcaaggtaagtgggttagttttctaagcccttcccattgtttttgaggaaagtaaaagtactcacttataaatatttaataagtcaaggatgcctattatatccttgggggaagcattgaataaatgataatgctaagctaagagaggaggaagatggaacaataaaatcagctgaagtactaaatttaaaatgcaaaactatagtaataaatatgagaaaaatatgaaggaaaatatttttaaatgtggaattggccatatacattttttaagatgtgatgaaaaatactgtgaataaaattttttaagtcactgggagaaaacatttgcaaattaacatatgaaggtcaattctttttttcatcattttagagatagggtctcattctgttgctcaggccggaatgcagtcatgtgattatagctcactgcagctttgaactcctgggctcaagtgatccttccacctcagcctcccatgtagctgggactacagacacacaccctcatacccggctaattttttatttttatttttttggttgagatgggggtctcactttgttgcccaggctgatcttgaagtcctggcctcaagtgatccttcagttgcagccccctaaagtgctgggattacaggtgtgagccactgattccagcccaaaaatattttatacacaaatagtttctttgataaaataagaaaaaggcaaacaaggcaacggaaacatgggcaaagaatatgaacagataacatactttaccaataaacagatataaagatatccaaccttaatagttatcaaggacctgcaaaaaatatgtatttcttaaatataagattagctaatagtaaaaagatggattaataccttgttaatgaggatgcaagaaaacatagctgtatttagttggtgcaaggttaaatttgtaaagccactgtggagagcagattggcaaaatctataaagtttttgtgaatgtgaatatctttcttccctaaatatcttctctgtagacatatgtactcatattatataaagcttttcctacctgaatattcatcaaagcatggtttattacagctaaaaattgcagaaggtaaatcagaagggaaatactttatttaaaggaagtactcaataaatacttgttgtgtacattcatttaaataaaatgaagtatagtcacactataaaaaactatcaagtctttagaatgaatgtagtagattcctatgtatggttatgttaatatctctaaaatatattcttaatttaaaaagtgtagaagtagaacaatatgaatagtgttcccatttatttttaaaagtaaataaacatgaaaatatgtagacatgtatatgcatgtaagtgattgtataaaaaccaaaagaatttatactaacaattaatatggcttacttttgggtagttgggtggaaataggaatggaataggatgtgaaaagggacattttattctgtatatttcagatttaatgttagtcttttacaatgtgaatgtcttcacatatttttgtacaataataaaattgttccttagttcattcccaagaagtataatgctaaggcacattttgtaaattaagtgcagcatataaacaaacttattaacatattgatagacagagtgacttcatctgggtttttacaagacgaaaggctgcataggaaaaaatacgtgaactctcaatccataaaattaagtgctttacaagtgtgttgctaccatatttaaaatttcaatataaactaggtttactaaaaagtcatttatagagtaaaaatctagtgtggtgctataacatcccaaattttccccaagaaaataaaatttctatcatgaattatgcatttttatcatattgtaaaaatatttattcagcttaatttcaccaaagtggcaacacatcaaatcttagatcatttgtattttcaaaggttatatcctatgtatgcatttcaatacacacacacatatatacacatttgtgtttggatataaaaacataagattaagtctgctttaataatttttctaacttacaaaatgtgttagataggtatagctttatttgtaatcatttaagccaactcactcaatctgtttcaatattttattttgcagcatgggcattttcacataagccccattgcacagctccaggggcaccattcacattgcagtccatgtgtttaatggagttgtgcattgtacagattgtgcagccattggtggaggccctgtttttgaaagcggttctgtagcagaatctgattataataaatatgatatacttagaaagatatttaaagaaaatcataaatatgcctaagtgcttaccttgactagagtcacattttggcagcctttcataacccgaaataataccacttaaggtcaataaatgcaggacctctctaaagtcagtgaatgtcaactgtatataatttcatgttctgagcacttattcctatagcaaaaacaaaataaaacactttttccttccttatttcaaaacccacacagattgtgggtgttaatgacactatacttaaacattgttagctttgtggcagaaaataaccatataaaaacataaattttattttctttctttaaactataaagttatagtgtcctgaataaacaaaatatgagacttacgtaaacattcacccttttaagaaaaaaaagaccaaaacagcattgcacattagatcatattttggaaacgaggaaggcaactgaagcacagctataaagatatctttttttctcttcagtttacccttgagatgtacctatcaaaataatctaaacttatccagatgatgtttttaatcttgaaaaaggcttttttcttgttggatgatcctattagcaaactgctggaagagaagatcatacaggccataatttgtagtttgacctactcacattgggtgttgctaaagaaaatcaatcagaaattgttgtgttaaaataactctatctgctctacctggcatgtgtgactaactgactttagaatctatcatttaaagaaaatggttgatgcttggatatacaatttatcaaacttcactccagtcctttttctccgaagcacagaaaaataatcatccctctctaaatataaatcttttaagagaaattcaaggaatctgtctccagcaaaataactgataaatggcagaagcataatttaaagatgatttccatcacagatcacatgacatctcaactcttgagactgtcacccaagtcttcccatctgttggcccacgagcatcaatctcagctcctctgtgaccagttctctgattgagctaggttggccttttcgtaattacagcttgctcatttccctctgccttgcagtatgaggctgttcttactgcctgaaaagttctctaacattttgctaccaacccatgcctactatcccctcatagcttcgtctgagagacacttttcttacagaaaaaaaaaagcgagagaagaaggaaggaataaaaagtgctttctcttacattaccttttacttgttatttccccaacattaaatgtcttgttcaaaaatactgtcagcatccactctcctagaaattgacttctaattataaagtgatatctcaagcaacctattactatctgtaattccatgagatctgggtaactgacattattgtttctcctgtttttctgagtataggagttacatacattcacctagtgttcaataattgttcactaaatcaattaatgtaaaggagaaaagttttattttattgattaattacacaaagttatatttggaaaatattattttggtgtgtggactgaaaaacctaaatcaatatcttaaattattaatcattaagcccatgaccaggaaattaaaagctggtaatggaataacacatgtctatattagtcatgttttctgttatagagaaactgccttatatggaccaccttgggaaatgtctaactattgtcaagactgtaagataccagaggccactaatattattgactatatcaaaatttaaaatttctattctaggggagggaaacatcataaacaaatttaaaaatcaaactctaaaaataaaatttccagtataaatgacagaaaaggcataatagtcttaatattctatataatcaataagaaaaaggttaccacactaatgggaaaattaacaaagcatatttacaagagaaaatataaatagccaataaacttatgcaaagattttcaccctttacagtactcaaagcaatgtagattcaacaaaaatcaaattctcgaaaattaaaatgaaaccattggcttgtgagaatgtgatgaatggcattctcatatattgctgggaagaatgtacattgttaaactttccagagagtggtttggcaagatatatcaaattttttatttgtatttaccttttgagccaaggattgtccttcactggatttatcccaagtagataatcagacaatgggcagaaatatgggtgcatatatttgattataatgggaaaaaactgtagagtagccaaatgtctgttattagaagaagtttaaaattcttatggtgcctctatataattctatcatcaagagtattcatatagtgttgtacttacgatggaaagttattcacactatgttaattatttgataacaagctactaaatgtgtccattgtgactgcagtttatagttttacacccacatctgtgtatgtatatgtatacatatacatacatgtatacatatacatacatgtatacatatacatacacagagagagagagaacgggtcctgaaggacatacatcaaattgttagcagtagtcctgggttgtcaagaaaatgatgaaaagcatttgatgttaatggtataccagatcatcttcactttctctttcctttatgcttgtctttatgaaattatttttctgaaattatgttttgcaatcagcatgtattatagcatatatacatgttctcatttttaaaaagtaacagcttaaattaccaaagttttactctgttcccttttattttccttactcagcattatttcttttttccttgcttatttaacttttaaaaaatgcataacattataaaaatgtctgttttattttgaacagatgcatttcatgtttatgtgattaggcagtgtcctttttccctaaagcaaaaggttctattgcaaatgaagatttaattattacttgaggatgagtatgttattattcatgagttatataagtcataaaaaatgtccagggtgataacaatacgacctagaaaacaaggactttagctaaggggatttactctgctatttatgatattatctggccaatagatggcaggacttgggggaatgaatgcagtctaagaaaaatcatcatgtttccattctctgattacaaacccgcagaatccattaataatccacacttctggcttaaagtgttcttttcagtcttttctagggtgtccagatatgcatgcctaaagtaaactgtatcaggttcagcaacccacatttgaaagtggacattttcaaatcaaaatgttgtcaaaggaaaataacctggattttccaagaccagaggcctctgaaaaagaaaagattcagagtggatataactgtcttcaaatctaaaggactagcaagataaagaagagatttgtcttgtctgcataactcccagatggcaaaccaaagatcgttggatcttctagggaggatttttactaaataaatgcaatcactttctaaatatagaagtagccagaaatggaagggatgagatgtgggagggcagaggctcaagccttcctcagttttatactaccaactctcagcacaggtcctggcagagagacggcactttaagttttatggaatgaattgagagataataggttacatcttcattgaatatatttcaagtttagcaatatggcttttgttgaatgatattttctgaagttgtttaaagcactagaagggaaattgaactagatgatctatgagtatgtgaccatcaaacccagatttttctaggattttttaggactttcaatttaaactattttgtcctattcttcccatgggtatatttccaaatgttcttctcattagtaaagtccaaaatttatgatcagctagtcttactctgggtagcaattactaatagaataacaaagtggattcctttctatgggctggaaatcatataggattgcttacagttggagtggataaatgcagttgtttataactaaaaggtcacttaccataaatatatagctggctctatcttggtgaatgcagacttacatgttaataaatataatcaatgtaagtcaaccaagactctagggttatatatttttattgatcgctttttttaaaaaagaagattttgatcacagttctataatattgggccacataccaatgttttcatagtgttcaagttggcttatgaggccactctttaggcttggtgagtgtttgacagatggctgagaatatacaagcagatatgcactgtgcatgaaagcatgcaagtgaagagtcaattaagaaagaataaacatgcttagaaagaggccacctgattggtattctgactacagaattgagaaactttctatgcaaattatgcagctgcatcagcaccattgacattataggagtgaagaggagaaaaaaaaaacaggaaaaaaaaaacaacaacagagttctctgtggcaaaatagttttgtgcccgatcaaggaaataatataaagggggatgtggtagagggaagttactttttcttctatttgcctgaaccactaatgaccacagcagaagtagcaagtttaactgatgaatatggagtttcatagctcccagagcactgactttggactaagaagaatttagatgggagatgcaacctactttcccttatttcaagatttgcatgcctggtacatacagtatcatataaatgtacaaaggcttgtgaggagacacacacacacacacacacacacacacacacacacacacactctaaacagcaggagcaccaaagaggtagatcatccattattcaaggaatttttttcgcccctattcaatacacagtaacttaaataataagggactttcatataaaaagataaagtattttagatgggaaaaaaagacataatataagctaacaaatgaacccagttattttgcttcatttaaagagcggaaatctgacttgaatgatcttttcctcaataataagcaaaatacattaaataaatataacatactaatattcatgacctggagcaactcatgtttcttctatgaagacttttctgacttctgtagaccatgctgaatcctccctcctgtagaccaccattgatgtgaactaaggcactgtgctttttggtatcagtttatatgtaatctgactttagctgggctgccttcaggcctgcctctacttactctttctctctctctcacacacacacacacatatgcacgcacataaactcctgctgccccctacacacagttgattcctaggagcttgagggaaatggtgacttcttactacatatctttagctttctttaaaagctcagcccaaagatgatacatagggcatcacacagagacctggatagtctcctaagttttctgttggttttaaaaatatgtgcaaaggtcaggcgcagtggctcacgcctgtaatcccagcactttgggaggccaaggtgggcagatagaacacttgaggccagtagttcgagaccagcctggccaacatggtgaaacccccgtctctattaaaaatacaaaaaaaaaaaattagctgggcgtggtggcaggcacctgcaatcccagctactcaggaggctgagtcaggagaatcgcttgaacctgggaggtggaggttgcagggagccgagatagtgccactgccttccagcctgggtgacagagtgaaaccctgtctaaaaatatatatatatatgcccaaattcttccaaatattctagaacttaatttctttccccttgaaagtgggctgggcttagtgcctttcttctagtgaatacaatatggcagaaatggcagaataccacttctaagatgaggctataaaaaacctgtggcttccatctcagttcctctcttgatctctctcttgcactggtgatgctggttgctatgctataaggacacttggcagcatctggcgaggcccacaaggccagagcctgaggcccacctacagatgcctgagtgagcttggaagtagatcctcctctaattgatccctgagatgaatgcaggcctgactgacagcttgagtgaaatatcatgaaagaccctgagcaagtaccacatagctaaactgcgctcagatccctgacccacagaattgtgtatttctaagtatttgctgttttaagcgcccaggcttggggtaatttgttacatagcaatagataactaatacatttcccattcataacagcagccgaaatctctctcttttgccccatatttcaatcatccccaaaatgcttactccatttttttttttttcattttctcctcccctgtgtctggctgcttcttgcacaacccactctagcctcctgttgttgctcttcaatctcagaaaagcccccttggatttctggttaaaaaaaaaaacaaaacagttctcctccatgaatggcttgtctcccaaaccattgtacataataggtgcttaataaatatctgttcatagtataagcaaacttcaaattcttttgacttgtgcaaacaaaatttattcatttgaaaaatattttcttaacaattgagactaaagttatggagagaggtgcttcagtgtttgaagctaagtcttttgtgagcaagacttgctactgataactctaaaaccttatctggtacctgagcgagacagacattggactccctgtactctttggcttctggaacaggaagaagcatacattttaatttcacatgatcaaagctactgtacagttaaagctcagcaagtactttccactcaggaacaattctgggttgaagatcattgtcttctaaatgcatttccaggtcagtgtctgttgcaacctgattatcaaggtatttattgaacaaatgcagtatgcctaccagcattcccagtactctggagactttctgtcagtcagtaagttcctgtacacatattacttttattgctatcatgtgacactggctagtaaaacaaacacagtttcaaaatgctcagagcctagcaagagaaacagacattaatttagtaaacccacaggcacataattacaaaccaagtactataaaggaaaaatagaggttaccctaaagaggtatattagagagcttcttataatcagtggatcaaggaaggctcctgtgagttagttatctttgtgaagagatctaggcataacatgttaactaggcaaacatgtagtgcaaagggaagtggagttagttgagcatttactgtatgctaggcactaagcactttaaatattacacacacataatcttcacaacaaccatagagggtgagcacctcttcaaccatacttttaaaacatgaaatctattactaatgtccacaagcttaaccactgtccgaagcttcctctgcagacttgagttaatccttaaaagtatcaaagacaaccatgaatgaaagagactgtctagattatttttcagttaagcagcatgtgatattgattatctacagaagtttcaacaattaaaacccaaacaaaatagaacacagtttgaattattaccttccaaacatgcactctaaaagaataaaggatgatataaataatagtgtaacgaagttactttattcttttacaaccctttccatttctttatactttctacccaagaaccccatgatgttctttttatgtaataaatactgctaaccaaatatatatgtttcagtttatgtgcagtttatgaaaacgaacaccataccgtgtattaaattacagccgaaattgagaaaagagaagggaacgcagttcattattctttgttaaataatgaatgtttttgaaataatatgatcattaaatgcaaatgagcataactctgatataaatgtaaatttttcaaaacttgaaatgttccttaagataaactctttggctgaattctgaatatttaattgttccgctttcacaaaatgaatgcagtcacctattcaacataattagttatctagggaaaaacaattataattgaacatagctgcttcccaaatgcgttttaaataacataaacagtcctatgttaaatatttggcccgctgcttggatatcttgtatttgcctctccagacccctttttctaccctacattgtgcctcagaatgctaatgttatggaacccatccagaggctcctttgcttcctggtcttctacctatgctggcagggtgcctgggtgggagaaagcttgaggctggggaggtttcattcccagctccctctccattgaatcactacatgttgggtgcatccttcacaggttatagtttctgtcctgtctatgcagctcttctccctgtattctggaaactgttccttcccctttcccaatcacccgagggataataacagataggatgctgtgccatccccgttactttccctcaaaccagcctgcacctttgtataaagtccttttattaaaccctcctcaatgacccattttcggtgcactattttctcttagaaccctaactctatagtaattgataccaggagtggcctcaggaaactgatcctcaaatgagattcgaattgggttgttcatgtatgtgcgtggtgtccagaaaacttactgggcaggagtaggtgtagggagaaattgggatgcaacactgaggaacatgaccgagcattgactgtaagaatagccaacagaagataattaaatagcaagttaggcaggcgaatgtgttgatgtgagtgcactcaggatacgggacttgagaatgtgggtccagcactcaggagtgtcattaagagtctgctaggctgctaggcttgccatacagtcaattaggttgttgtggcagaacctccctggcaggatgcaaagaaaagaaaggattctgatagttcagggagatgaaataatgtactatctgtttagccattttctacttatcacctgtggatgtccagaggatacactcctcttatctgggcattcaggaatcccttattggggaggttttcatcatcactgaccaccctagtagtggctattctcagtaggctgacttctaatcagaggcgtgagatgctttgaacaatgtttgggatgaagagtgtgctaaagggaacagtccacaatcaccattctaatgacaagcttatgtgtttttaatcactaaatgaatcttcagtattagtgagaaaaacatgttgcaatggaacttttttttaaagaaatctcctgaaaatatacactgctcactaaccttgaatgaatgtactctgcataattgacacaaaaaagtgtggagaattatttcaagttttgcacaaggtaaaaacagaagctgatacatgagcttggttcaaaggtaagccccccaccacaggtagttggattaccattaacgattttcttaatctctatgaagttcgattcttcatctacaaaataaggggactaatatctgtctcccattgttgtgcagataaacaagacagggcctggcataggacagcatctcaactaacagggcaaagtaagtttgccttgggcattcctctctcattggcatttgcaatctattactacatcttatactataaccttgggatcaggctccacaactacttattttacatccctcatgcccagcacatagacagacgcataccagatcctaactagtgagagtgattcaatgaattcatgaatgtgttgttgtgaggatgcaatggaagtggttactttaaggtgtacctttctttccttccctctattggtgtttacatttcacgtcttcatttgttgcctttatagtcaaggacaatttacttaactgcaggtttgcagtaggttcctcctcattaaaattgagatgacatctctctcttttccattcgggctgctataacaaaaatatcataaactggatggctcataagcaacaagaatttatttcttacagttctagagactggtaaatccaagataaggcaccagcagatttctagtgtctagagaagacttgctctctgctttataaggagtgccttcttactgtgtcctcacttggtggaagggatgaacaaactccctttggcttctttcatagggcattaatcccctttatgagggtggagccatcgtgacctaattgcctctcaaaggccacccctcttcataccatacgttggggactaagtttcaacatatcaatgttggggagatgggaacattcagaccatagcaacctactaccctagtagcagtgctgtgaaataaattagataacagtttaaatacctacaaaatagggcgtactccataaattttattttcctttcttttgtccaatttgtatttcaaggactcaacacattatagacactgaaataaatgttgtccatgatggactacgcataaacttctaatctggaaactttatacactgttcatttctttaaaaaacctcccaaatatcagattactgcccatgggattgcaaaatatttttatgccttttatggttaaaatgctctaagaatttggaagaagtcccacttctgaaagttatttcaataaatccaaaatgaatagatgtggaaaatatttaacattcaacagttaattttgaataagagagatacgtagttgattttatcccttttatttctacaaaccataagaagaaacagtttggacaggttcctcaaaagaggctccccaaatcctttttaatgggatacatcaactcaagtgtcacccaaagattattcctaacaaatgtacatattgtttgactttgcttggaataaacaaaaagcttaaaattagattattgcttagaaacagagccattaaattaaaataaggccagacatttggaactaagtcagtttaagagagtcacctttcattaaattatggctaccatgtttggatttttttttagctttatgccatagccataaaaactcagttaaaatttcacagtaagtgcctagtgccttcacacaaattcacaaaatcagtgcctttaaataaattcatttttcatactaaaagaaatgccaataaccactaaatcactaaaactaaaaggcaaagaagtggaaatttttttaaagtcatttaaatcgctgtttgcctgacttacttgtccccctcaaatttaaaaaaaaaaaatgtatagagacaacaactcaatgctgcttcccctcatttctctcatttttcgtagggttccagcactgtatcactattggaaatgtaactaatttaaacttatttagaaaaagaagctttatttatagccttatttgtgctgagcagcttttcaaaaaacacatttttcagattaatggaaatgtttgtggtaacattagctctacttgccattccaaaactataaaatgaattaagagggagaacgacttgaattaaagcatgagtgacttcataaaaataaacactttacataatttgtaaatttaaatttttgttacctcaaaatgtaggcagaatgatttataaacataatgcatttatttgccaaaaacaagaagaaatttgcctgattactaataaaaattattttaaatgatttttccagtgagttttttgtgtgtatatcactgatggaaactttttattctgtgccacagattctcatttccacatacagttttgtgaccggagacttgacatgctgaattaatgtttgtgtgtgtgagtgtgtgtgtgtgtgtgtgtgtgtgtgtgtagagatataaatatagagataatgatagagacatcattataatagcttctttagggagctcttagagttaactggagaaaccctaagtttcattgaacacagtttgaatcctaaagtagttgtgatgctatttatattctccgaatatactgtaaacacaaaaatattccactttttaaaatagtggaaatatgttaataaggcataaaatttacaaataattttatctttcaaatatgaaaaatgcttcatccaaaaactaatgatcctggtccacctggtttcagctctgatggactatcttgtaaaaaaccatgctctaatcaagaatacatagaaaagtggatactttttttaaagtaagtttgaaggcattggaggttttccaaggtagtcaggatttaagaggtcacaatcctagagagaagcaaagatttttgaggtggacccaatatttgtgttgctcttcctctaggggaatcaaaactctgaatatgagcatgtcaaggtggccaggatcaagaggacaagattacaggaagaagatgggtacacagaagtgaatctgatactctgtgacagcttttcactccaggcatttgctgattcttaagccatggtggtcaaatgacccaaatgtatactacaaaccccaaatcaatcaccaaaaacaaacaaaaacttatagctaaaaatcaagcagaagggataacattaaatacaaaagtactcaatacaaaagaaggcagaaaaagagaacaaaggagttatgggataaatagaaataaatagtcaagatggtagatttaaaccgaactaaatcagttatcacactaaaaagaaatgtatgcctaaccatataaattatcacattaaacataacaccccttgtgaaaagaaaaaaggtaaagatgatcagattgccaactatttcacccactatataattcctacaagaataaggacataaacagtttgcaagtggggaaattatggaaaatatgtataccacgttaacagcaatcataaaaagcaggattggttttataagtatcagactcagtagctgtcagggcaaatatgaccagtgagaaagaaggtgatttcctaataaaaaaaggcaccaaatcatcaagaggacataaaaatcctaaatgtttatatacttaacagagattgaaaatatatgaagcaaaggccaatagacctgcaaggaaaatagacacatttactcttataatggtaaatgtcaacactctcttttaacaattgataaagacaaagttagtaaaaatatagacaatttgaacaagactatcaaataatttgacatcattgacatttatataaggagaacaacagaaaacattcattttaagtgcacaaaaaatatttacaagttagttcatattctagaccataaaacaagtctaaattaatttcaaaagattcaaatcatacaaagtatgctttctgatcaaaattgaattttagaagtcagtaacagaaaatcccaaatatgtacagactaaatacacagttctccataacccatggataaaagaagaaataaaaaaggaatttaaaaagcattttgaatgggatgaaaatgaaagcaccaaataccaaaatttgtgctattgtgaatagtgctgcaaaaaacatacgtgtgcatgatttataatcctttggttatatacctagtaatgggattgctgggtcaaatgatatttctggttctagatccttgaggaatcgccacactgtcttccacaatggttgaactaatttacactcccatcaacagtgtaaaagcattcctatttctccacatcctccacagccctatttctccacatcctccacagcatctgttgtttcctgactttttaatgattaccattctaactggtgtcagatggtttctcatcgtggttttgatttgcatttctctgatgaccagtgatgatgagcattttttcacgtgtctgttggctgcatagatgtcttcttctgagaagtgtctgttcatatcctttgcccagtttttgatggggttgtttttttcttgtaaatttgtttgagttctttgtaaattctggatattagccctttggcagatgggtagattacaaaaattttcttccattctgtaggttgcctgttcactctgacagtagtttcttttgccatgcagaagcactttagtttaattagatcccatttgtctattttggcttttgttgccattgcttttggtgttttagtcatgaagtccttgcccatgtctatgtcctgaatggtactgcctaggttttgttctagggtttttatggttttagatctaacatttaagtctttaatccatcttgaaataatttatgtataaggtgtaattaagggatttagtttcagctttctacatatggctagccagttttcccagcaccatttattaaatagggaatcctttccccatttcttgtttttgtcaggtttgtcaaagatccgatggttgtagatgtgtggtgttatttctgaagcctctgttctgttccactggtctatatctctgttttcgtaccagtaccatgctgttttggttactgtagcccttgtagtatagtttgaagtcaggtagcatgatgctttcagctttgttctttttgcttaggattgccttggcaatgcgggctcttttttggttctatatgaactttaaagtagctttttccaattctgtgacgaaagtcattggtagcttgatggggatggcattgaatctataaattaccttgggcactatggccattttcacgatattgattcctcttatccatgggcatggaatgttcttccatttgtttgtatcctcttttattttgttgagcagtggtttgtagttctccttgaagaggtccttcacatcccttgtaagttggattcctaggtattttatcctctttgtagcaattgtgaatgggagttcactcatgatttggctctctgtttgtctgttattcgtgtataagaatgccttgtgattgatttttgcacattgattttgtatcctgagactttgctgaagttgctaatcaccttaggtagattttgggctgaaacgatggggttttctaaataacaagcatgtcaactgcaaacagggacaatttgacttcctcttttcctaattgaatacgctttatttctttctcttgcctgattgccctggccagaacttccaacactacgttgaataggaatggtgagagagggcatccttgtcttgtgctggttttcaaagggaatgcttccagttgttgcccattccgtatgatattggctgtgggtttgtcataaatagctcttattattttgagatacgttccatcaatacctagtttattgagagtatttagcatgagggcttttgaattttgtcgaaggccttttctgcatctattgagataatcatgtggtttttgtcattggttctgtttatgtgatggattacgtttattgatttgcatatgtggaaccagccttgcatcccagggatgaagccaacctgatcgtggtggataagctttttgatgtgctgctggattcggtttgccagtattttattgaggattttgcatcgatgttcatcagggatattggtctacaattctcttttttttgttgtgtctctgccaggctttggtatcacgatgatgttggcctcataaaatgagttagggaggattccctctttttctattgattggaatagtttcagaaggaatggtaccagctcctcttagtacctttggtagaatttggctgtgaatccatcttgtcctggactttttttggttggtaggctactaattattgcctcaatttcagagtctattattggtctattcggagattcaacttcttcctggtttagtcttgggagggtctatgtgtccaggaatatatccatttcttgtagattttctagtttatttgcgtagaggtgtttatagtattctctgatggtagtttgtatttctgtgggattggtggtgatatcccctttgtcattttttattgtgtctatttgattcttctctcttttcttctttattagtcttgctagtggtctatcaattttgttgatcttttcaaaaaaccagctcctggattcattgattttttgaagggtttttttgtgtctctatctctttcagtcctgctctgatcttagttatttcttgccttctgctagcttttgaatttgtttgttcttgcttctctagttatttcaattgtgatgttagggtgtcaattttagatctttcctgctttcttttgtgggcatttagtgctataaatttccctctatatactgctttaaatgtgtcctagagattctggtacgttgtgtctttgttcttattggtgtcaaagaacatctttatttctgccttcatttcgttatttaccctgtaatcattcaggagcaagttgttcagtttccatgtagttgtgcgcttttgagtgagtttcctaatcctaagttctaatttgattgcactgtggtctgagagacagtttgttgtgatttctgttcttttacatttgctgaggagtgctttacttccaattatgtggtcagttttagaataagtgtgatgtggtgctgagaagaatgtatattctgttgatttggggtggagagttctgcagatgtttattaggtctgcttggtgcagagctgagttgaagtcctggatatccttgtaaaccttctatctcgttgatctgtctaatattgacagtggggtgttaaagtgtcccattattattgtgtgggagtccaagtctctttgtaggtctctaaggacttgctttatgaatctgggtgctcctgtattgggtgcatatatatttaggatagttagctcttcttgttgaattgatccctttaccattatgtaatggccttctttgtctcttttaatctttgttggtttaaaatctgttttatcagagattaggcttgcaaccctgctttttttttgcttcccatttgcttggcagatcttcctccatctctttattttgagcttatgtgcatctttgcatgtgagaggcatctcctgaatacagcacactgatgggtcttgactctttatccaatctgccagtctgtgtcctttaattggggcatttagcccatttacatttaaggttaatattgttgtgtgtgaatttgatcctgtcattgtgatattagttggttattttgcccgttaattgatgcagtttcttcatagcatcgatggtctttacaatttggcatgtttttgcagtggctcgtaccggttgtttctttccatgtttagtgcttccttcaggagctcttctaaggcaggcctagtggtgacaaaatctcagcatttgcttgtctgtaaaggattttatttctccttcacttatgaagcttagtttggctggatatgacattctgggttgaaaattcttttctttaagaatgttgaatattggcccccactctcttctggcttgtagggtttctgccaggagatccactgttagtctgatggacttccctttgtgggtaactcaacctttctctctggctgcccttaacattttttccttcatttcaaccttggtgaatctgacaattatgtttcttggggttgcttttcctgaggagtatctctgtggaattaaaataaatggaattaaattataatattttaaaatattttccacaagccaacttcccagcctaaattgcttcatatttaagatgatataaaattataagaagttttcctataattttttaatattcaatatatttttttctgtatttcctataatgccaaaacatgacaaggacattcattgtaagaaaggaaaattactgacatatctttgttattaacacacaaagtaaattttaggatatcctaaatgtgagggttgcaacagggaggaagcagaagctgccagtcctcttagaagtcaggctcagaactggcacagtgtcacttcagtcttgttgcattggttaaagcagtcacagagtcagctaggatgcaaggggagcagaaataaaccccacctttcaatggggggagtgacagggaatttgcaggcacccacaattcatcacatcttcccacctctttcaaatttatgcttgtccaaaaccagctctatcaccaaagttcatttcaaatcctctctcttgtatgaattattaacccctaaactgaaaatagctcttccattttcccctgtgaactctcatttttatctctacctttcttggggcacttttaactttcaatcttgaattatttatgtaagtcttatctcctctacattttaaataacatttatttctagttactgaaataagaaattcatattatagaaaattgtcaagattcatttctgaataatacctctctcaaactgccttgcaaatatgagatgcttgataaacatttaataagtgaagattgtaataaaatccaaactttctaataggtcaatactagatatttctgagattgtttggcttgtgactttcttctgtatactaatcatatatatttaaatacagataggcaaaaatgaaactaaataatagttgtgtgtattttaccagactcacattggggagaaaaaaagaaaagaaaaagaaaatagtataatggcgaacactaccgaattcttaactatgtgtcaggcacaattctaaaaacttcatcctcctaacatcctgcaaggttttgaagaaaaggaaaaaattaccaaggaatgcaaaacaaaggaaacaaaagaggcaaaaaaaaattatcctatagacctgaagagctccaaaacatctgaaattctgacataagttggctacatggtgagggaagccagcttctaagaacatacacaggaaagaactttggaataaagggcacttttcctctgacttaatctattcatttcatatttaatggagtactattttatgaattcttatttttgaaaataaatacatcaattttctggcgaatggaactttaagttctttaaattaccttcatttttaatataatattaacatctttaactgccaggaaaagaaaagcctaataatgacttagtttttaaaaattgtgctgtacctagagatccacaactacaatgagacaaaattaaacaaatttctgatacttttatttaacaaccaaaaagtattgcatgttcagtactatgctttataatggtggaaaaacaaaaaaggagggtaatatggtaccagacatcagagaattatgcgatctatttgaaaagataaaattaaatatttaggaaattaacaggaaagctttagtttaaaacacaagatagaggtcaggaaagggaggaatcacttcggaatataacagcaaaataaacttttgttggaagtgttgggaattgaggtgggccttcagagaagggcagaatttagaaaggttagcaaagaatattccagatttgagaaggtgaaaataagtaactgcacaagcaagggcatagagacaagaatgattgtaatattttaacccaatagcagggaagagacgactcatcttgagcagggttatgtatttgagattactggaaaatagaatctaatgggtaaggtagattatgacaagctctgaatggatgctggtccgcgtggttcaggcttggtacaataaaaacaacctgaggccattttcatccctgtctgcgagagtatttaatgtactaacggaacctttactgagttttaacataggaaagttcctcccaaagcgtagttggaatgaaatcttcctacttgttttccataaaatcagtatgattttccataaagagattattatttttgacatgaagcaaaggtcagattttgggtgtgtatttgtgtccatgaacattatgatgtatgtaggtgttttaatttccaaagtcagggtcaggaggcagattagggctacagtgtcatgacaaccaatcaagttgtttgtttcagtccaaaaagtagtcaattcactggaaaatgctcaatcaactaagtgtaaattaaaatagttatgaattgtttgtaaaaagcaaccacagtttgttttaaaaaggtatgaataattttgcatatgcataattttccctaaagatattattctttaaatatgaagcaaaggtcagaatttgagtgtttatatgcaggtgtatttgtgttttaatttcctaagtgggggttaggaggcagattaggactgcaaggggccaaggcaaccaatcaagttgtcattttggtctttgtccttgtctacaaagtagacagttcactggaaaaagttcaagcaattaagtttaaaataaaatatttacgaattcattatgaaaagtcaccttaagtttatctaatgaaaggtattaatatatatattattttaccacatctaacagcttgtcactgtattatataaataaatttgattaaactgaggggacatatttctcacaaaaaggtgttcatttctacccaatacgtacatcttctaggtgcttagaaattgatttccaattcataataaaaagtccagtaaaattgtcaaatgaaaagctttcatcaattacttttcattttataaacatgctttgaaaacaccttgttaattttacagaaagtcattaggttgcataaatcactttttgggtatatttactaatggaataaaataattccaatatatcatttgcttctgaatgcctcagagtttcaggaaggtattaataaggccccgcttcctgtatcttaaaccaaacatttagtttgatcattgctttcttgagtcttagaaaaacaaattatgaaagttataatggacttcttggaacggtaatgacataagggcatggttacaaaactgctttgtttgatttccaacttaaactaagaaaagttaggcctactttataaactccaaagagcaattattaggtgcaatattatttagacaatattgagagtacacactgagttgctggtttaacttaacctctccagttaatgaacacaatatagttacaggttacacatgattaaaaaaaaaaatctagattctcacccccacaccctccacacacacacatttttttggttagctttgaaaaacacagaaaatactcagcatagggtatacacttgcactgctgatgagcaagatgggaaatgacttttcaaaacagcatcttgttatgtttgacctgttctcttaattaagagtggtgtcatcgggccggcgcagtggctcatgcctgtaatcccaccactttgggaggccgagaggtggatcacccgaggtcaggagttcaagaccaacctggccaacatggtgaaaccccgtctctaacagaaatacaaaaaattagctgggtgtggtgacgggcacctgtaatcccagctactctggaggctgaggtaggagaatcacttgaactcaggagtcagaggtttcagtgagctgagatcacaccactgcactccagcctgagcagcagagtgagactccatctcaaaaaaaaaaaaaaaaaaaggcaaaaaagaaaataaaatcacacaaaaactgtgagggaatggacatagaaacaaggattgccagagagccaagaaagattcaacatgcataggactgccgtctctgaaggaaacagtagaacgaatggaataaaaaatcattcaaagacatcattgaaataacatttgggcaaggaagaaacgcaggatctgaagaacaaaaggaaccactgttctaaaagaaaaagatgaagaatgacacactctgagatgtggtcttacaaagttattgaacttcaattttttttaagtatgcaagcaataaaaatgcatcaccaacaaaggaagaggtaaaaaataaaaaataaaaataaaaaaaacactgacttacaaattttagcagctttacatgcaaaaaaaactgtggaacattgtcaacaggattttggaagaaaagagatttgaattacatactcagtcaaactggcatttaaatgtccagatgataggaaatgatctcaaatgtacaaagtctgaggaagtatatctcccacatatccaggtaatgtttttaaaaaatctacttgtcacaatctagccaatatacagattaatccaaataaaaacgacaggaatgggaaagtcccaggatgagaaatggtagaggattattaaattcagttgaacataaaattaaggccaaacaactaattggtgtaaaacggtataatgtttctaattcttgaaagaaacactacatcatgtggtgggggggcaggtaatgaggacaaaaccttcagagaataccacagtatctatcaggattctgggcatgaaacaacatcttcaaaaagacttaaagaacagtctatatagcggtgaacctccatgggctggtaagcacccgtgtacaaacagtagtaggaaagtataatatttttgttagattgtattgctggtcacccacctctgctttttcttcttttcttttcattctttttttttttttttttttttttttgcgacagagtctcactccgtcgcccaggctggagtgcggtggcgcgatctcggttaactgcaaactccgcctcccgggttcacgccattctcccgcctcagcctcctgagtagctgggactacacgcgcccgccaccacgcccggctaattttttgtatttttagtagagacggggtttcaccgtgttagccaggatggtctcgatctcctgacctcatgatccacccgtctcagcctcccaaagtgctgggattacaggcgtgaggcactgtgcccggccccacctctgctttttctagaggagtcttatacttccctgccccacttaaagttaaacttgcccatttacctgaataaaatgtgagctgaaatgtcatgaaacagatgggaagaagcttctgaagcccgtttgtgcttctccatcacgtaatccccagctagacatcaggaagaagcaccacaaccaacccgtggtggatatgtaccacgaacaatagttgtaagtcattgatatttgggagtaattttatagcagcaaatctaacctttcctcactagtatactactcctaagcctgaagaggaaagggaagggcaaagtattagtagagtctagtaagggatggaatcatggaagaggagccacaaaagaggaactgaagtcacagagtacagcacaggccacagccatgatgaagcagtgggacgtggggcaataaaaccctgacttctctttcctcccaccattttacttcctgcttgtggctccctttcaccaaatccggctggaagcagaagactgaggagtgatgcattccatagaattcagtgtcacaagccaggtttcccattatcaaatgctacgacagattttgggtgcaaaatctttattaggaatcaacacctgtgaagagaagggggaagaagcaggattggacagagaaagatgttgaacgtaattatgcagacaatgaactacagaacctcagccagtccactggggagctctgacgtaaggattatctataaaaatcttccacagaaggccaaaatgctcagccatgtgcccatcatgacagccctgaaaaaggctgatggccaaagatatttgttgtcaattggatgagtctctttgtctacttgtttgtttagttcttctgtggtgaatggtctctggtgggcgttaacatgtgacacatacatacacacaaactatatctatatttcctctttttacctacagagaaaacattatttttaagcagccatcacaaatttttaaatgtaatattttgtccacaaaataaacctcaataaattcctatattagaaatagtacataataaactgtctgacaatgatgcattaaagttaggaatgcaaaccatatatataaagaaacaatacaacagctgttgcaaattttttaatttactggaacaactctttagccaaaaagtaaatctaaatgaaaatttctagaaaaataataatctacaaattaattgccaaacctatgacacataaccagagctgtactcaggtccttaaaattgttttaatgtgaaacaataaaaaaagaataaagcatttactcaagagtttatttaaaaaattaacagcaaagaaatcagaagaaagtcattaacgatcacagtagaaataaatgaattttttaaataaatgaatattttaaagaaaagtggtagaactcataaattcaagaattgcttcttctaaaaaaaaaactggtaaaatactagctagcctaaattttaaaaagaaaattaaaggataagcaccaatacaaaaaaatacgtaaattagaaagcagcaatggccatagatcaccgcagagaaatgtggttgaaggagaagtaaaaattatcaaaatagacactagattatattgaaagcctaaatcaaccaatacctatggaagaaaaactgaaaacaaagaagtcttcagaggggaatttttaaagcttcaaataattgataattgacccgtatttaacaaggctagataaagtagaaaagctgttcacattttttataaatgaaaaataatgattcaaatcctgtcaaaagtacgctaaaagggaaaattacaatcaattcacttctgaatattggtacaaatgacctaaataaaatgttggcaagtagaattcagcaacactttaaaagaataacacgtcatgatcaagtggagttattgcaggacagcaaggatggctcattgacataagtcaccacttagtagacaagaagaaaaaactgttacaattttgatatcttcttgataaacactaaaaaagacttgatacaatttaatattctcacacattactgataggggcttttactaaaatacgaatataagaatatttaacatttttatagtatacattccccaaatcaaaagcaaaaatatgaaatactagaagcattcccattaaaaatgatgctaagacaaggtcctacattatttaacatttacgtgactggcttttgctagtcaatgtaataagagaatgaaacaggcagtgtattagtgtgctcagattgccatagccaagcaccacaggctagatgatggaaacaatagaaatttgtttcctcacagttctggagtctggaagcccaagaccaggggccagcatgcttagcttttggtaaggggtctcttttaggtttgcagatggccaccttctcactgggtcctcacagggcatagaggaagagctagctctctagtgtctcttttaataaggacactaattctatcagatccaggaccccacccttaggactcatttactcttgattacttccttacactaaatgcagtaacattggaggttaaggcttcaacatataaattgaggctggagggaacacaaccgatcatggcaaaaagtattaatactggaaagaaggtaaaattatgatgacttttaaactgtataactatctgaaaaagcccagagaatcggttgaaaattctgtgcaaaaaagtagcattcagtatgctggctttaaaaaccaaaacacaaaagtcagtagcatttttatgtttaagcaatataattagaaaatatagcagaataaaaagtccattcacaaaagtaagaaaagttttagatagctatgaaaatcccaaaagaatgacccaaatgatcaaactatatactttcctgaaaaaaataaaggaagactttaacaaaagaagcatactttcttcattgatagaaatactcaatattgtacaaattcaagccctttcttaatgtttaaatccaatgtgatgccaatcaaaaccctaacaaaatttgtgactggagtatctccattcaggatatgtagactgagaatagagaatattgcaaaattattctttcatctggagaaataaacatgatgtaataaagaaaaactgactataccatatacaatgatacaggatatggaaaagaccaacagatcattgtagcacaataaagagtttagaaatagctgtgagccttttctttatcttaatatctgataaacatggcattcaaattaatgattgaaatatggaaaatgggaaaacactcccatatctaaaacttagataccagaagtagattttatatgagtgaacattcataatttgtttatagttttagatgggaaggcctttgaaaatgtctcatcagccacaaaggaaaagatggataattgtaaaacatcaaaattatatttttaattgaatcaggcaccaaaaacaagcttgaacttttttaaaaaagaaatattatttgtaacacatgttaaagggttaatatcttcagcatctcatacatcaataagagaaaggaaaacaccacaacagtaggggggagggatagcattaggagatatacctaatgtaaatgacgagttaacaggtgcagcacaccaacatggcacatgtatacatatgtaacaaacctgcatgttgtgcacatataccctagaacttaaagtataataaaacaggttcatcttaccgaatatctttttcttatattagtggacattttctttcttcttttaggaaatgcctgttgatgttgtttattttactgttgtagtgttttcctttctcttattggcgatcattaaaaagtcaggaaacaacaggtgctggagaggatgtggagaaataggaacgcttttacactgttggtgggactgtaaactagttcaaccattgtggaagacagtgtggcaattcctcaaggatctagaaccagaaataccattttacccagccatcccattactgggtacatacccaaaggattataaatcatgctgctataaagacacatgcacacatacgtttactgcagcactattcacagtagcaaaaacttggaaccaacccaaatgtccatcaatgatagactggattaagaaaatgtggcgcatatacaccaaggaatactatgcagccataaaaaaggatgagttcatttccttttcaggtacatggatgaagctagaaaccatcattctgagcaaactatcagaaggacagaaaaccaaacaccacatgttctcactcataggtgggaactgaacaatgagaacacttggacatagggtggggaacatcacacaatggggcctgttgtggggtagggggaggggggagggatagcattaggagatatacctaatgtaaatgatgagttaatgggtgcagcacaccaacatggcacatgtatacatatgtaacaaacctgcacattgtgaacatgtaccttagaacttaaagtataataaaaaataaaataaataaaaaataaaaatatacttctgcatgtattgacatgggtagatatctacaatgtcgagtggatgaagtgagtcatgaaacactatggataatgtggttagtttttataaaaataaacacttataccaagaaaaaaaaagaaagaaaaagatattcagtcttgctaatgacaaaagggatacaaacaagataatatgacactgttcctcctttatcagatcagcaactttgtatgtgatccctgtgtgagagaaactctcatactgtttgtggaatcttaaattgggattccactacagtgcgattttttaaaatctatcaaaattttaggcaggcataccccttgacatagcaattttaatttcaaagatttgttccaagaagttaattcaatatgtgtaacaatatgtccatgaagatttctgctctagtgttatttattacaatcacgaaaatttggaaaatagtgtttctcaataagaaatcgattaagtacacatttgtacatacatccaatataaggctacgtaccaattaaaaattataaacttgtgcatattcacaggatattgacataacaaaattacaaaatacctgtatcatactatcttatttattaaaataaatacatatataatattaagtgtcacaatataaaaatgtgggctatatttttacttgattacagagcaaactatctggaaaaaatatttatctaattatttacaatgggacgtggagtgatttttagtttttttttaaatatttttactacttgtattgcttgaactcttttacaatgattctgtttatttttatgaataaaaagcaataaaatccctttatctggtggggaaaatattgtaagaggggttactttgtgcgttcataatagttagaaaatattattattcatggaatcatatatgatggcccagaactggatgacctcctttttactcctacagccttcatttatggcacttgtataaattataataaggccaggcacagtggctcactcctgtaatcccagcactttgggaggcgagggggggtggatcacctgaggtcaggagttcgagaccagcctggccaatatggcaaaaccccgtctctacagaaaaaaaaaaaaaaaaaagtaccaagtatggtggcacacacctgtaattccagctctagggagactgaggcacaagaattgcttgagcctgagaggcatacgttgcagtgagccaagactgtgccactgcactccagcctgggcaacacagtgagaccctgccacatacacaaaaaaaatgttataataataagagataaaatgtgatcttagagctatcaccttctattagattataaacttcttgaaggcaggattatttcttatattttagactcccatagatcttaacacagggaagtactcagtaaatatttattgaattgaaccaattatacttctacaaccaacaaaaaaaaatcataatctctatacctacactaataaaactggaattttcaattatcttaaaatttcaaatttatctagttacaaagagaaagatgtataaattgttcatttcataaatctcaagaatagttttacattaataagattttcactgatagaatattgaagaaagatttgaattgttttaagttaattaaaatgcatctgaaagagctctagagttcaaagaatgtataatcaaaccccttatacacagaatttctctcctgtaaaagaagaaaaaactagaaatgtctgttttcatccataactctcttcaaatagcagaaacttggttaagaaaaaagcaaagatttttgcatgtttctgggataaaagaaaagcagaaatattttcctgataattgtcattctattccttttctgtattttctgtagcgtgtatttacattgattgggaacattttataattttgcaaattatcggcatgactcaataaaaaataaaccaaaataattttgaacacctaactggtaatatttttaaatgttccttgagctggaacaattagatgtttgaattacttactctgaatgctaatgtatgaatacttttctcctgttccacattcatccctctatatataaactatttaagtcacagtataattatggaatatgttagtagaaggaaggcaaagtgttttatcaatgcctgtaagcatcatttacattagcatctgttacagaattggttttaaattttatttctagacgcttaaaacctgtgggttacacacatcagtatttttagatataatttcaaaggactaaacccatttttgaacctttgtttcaacatgcttttgaaagcatacaaagacatgggtgttttatctttctgattttttgtatctttctttctgatttctttagcttcttttagatctgtaagtcttcttgtgcattgttggtttttctatttttttgtttgttttcccttaaatatataaagttagttcttacctatgtttatgtacaaggcctttaacacttgacatgtcagttctgcgacatttggtaataaaatacctttcctgaagtatggaattgtggagacagagctgccagcattacagttggcctgtcagtctttgcaaagcagcaccaaatatcacccagcccctgcagatctctgggcaaaaacatatcaatcctcataagtgaattcaatagaattcttcttgacaactacaaagaaataataatttgtattatctcttcacatttatatcttccttaaaagtgaaaaatgtattgaacccttgagattaagaggaattactagtttttaaaatacacatatataagcaatttgtttcaattaatattaaatagatcccaaaggattacttcagaatttgaattttcagaaattttgaccaagctaagcttctgccagcacaaccagaaggagactagcgagatggagcttatccatccacgagccacctttgagtcaacacaactggcagcagtgtaggggactactatagccagagccaagattcctaagcctttccttcttcctcctttcttcatcccatttctattctccttcttgaagtcatggctggggcactggagagaggggaatgccagcgcatgtctacagtcaagattttcatagcacagctttgaaatatggttacatgtggggggaactgggcaaaaaagtaaatatatcaaaaaagtgagctttgtgactgtagaagggagttatatttgtggtaagggggaagactagaataaaccatgtggtgttacacatatcagtgtgaactaagggttttaagacaaatagataagtataagacataatataatattttttctaactttgacttctaagagggccagaacaatacctcattaacaatgagcaaacttaaggattatgattcactttgagattctgattactataatctatgattgtacatgatggactatttcattttctagtaattgttgttgtgctttcattgaattataaacccagtttaagacatttctacaatgaagacagacaaatagccaacaggtatatgggaaaaaaaaatgctcaatgtcaccaatcatcagggaaatgcaaattaaaaccacaatgagataaacacctcacactcgtcaggatggctattatcaaaaacaaacaaaagacaaggtgaagatgtggagaaattggtacccttgtacactgttggtgggaatgcaaaatttccagccactgtggaaaacagtatggaggttcctcagaaattaaaaatataactgccatatatgatccagcaatcccacttcttagtatttatcaaaaagaatttaaatcaagatcccaaagagattttagcactcctgtgttcaccacagcactattcccaatagccaagatgtggaaaaccctaaatgcccatcaacagataatggattttagaatgtggtgtatacatacaatggaatattactcagcctttaaaaagaaggcaattgtgcaatatggacagcatggataaaccttgaggacatcgtgctaagtgaaataagtcagttacagaaaggcaaattctgtatgatttcacttatatcagttatctaaaatagaggccagcggggagaggaaaatggggagttactgatcaatggacatagggtttcagtcaagtaaaatgaataagctctagagatctcctgcgcaacattgtacctacagtcaataatgatgtattgtagacttaaaaatttgttaagatgatagatctcatgttgcgttctcaccactaaaagtaaaatatgccacccaaaacaaaacaatgagcactcttagcacccagctcttggtttctaaataccattgtccaataaaaaaaaaaaaactagagcttcttaagaaatgcctgactttgggtttgggaaaggaaaaaattagatggggctggaatatgttatcatgacaaaaagtaaagaagaatgatgggatcttgcccaaaagacacagatccagcttgaagggactcctcctagccaatgtgaacatccaagtaaattatgataggaacaaattgtaactatttgagcaaaatacatatccataaagcactacagttatgaataggtaaatgaaaaaaatagatatatgaagaggaaggaaaatacatcagtagaatgacaactaataaatccacaagaaacaatagagtttgaatattgtcatttagtaaccatcccaataattgatttaggaatgaatgatcaaagagtgctgaacttggtaggtgtaagtttggtaaggaatcaaatatttaaagcgtgccaatgtatcttcccataaaattattattaactgtttattaagtaataaatataatgtactgaataattaatttcacagttgagaaacttggcagatatcatttgatctaagtaataaacattcataatacaagtaatagtgcaaattattattgtttcctcctcatatactgcattaagaaaaacaacatgaattctgtgatattactgtcaaaaatgcataaatcattaagaaacgtcagacagccccaaagagggagattctaaaaggtaactgttgtaggctctttaaaaatgtcaaggtcaagaaaaataaggaaaggctgaggaactcttgtaaatcgaaagagactaaaggaatatttaaataaaacatatgctcctaaattggatattggacttataaataacattcttgggataattggcaaattttattggagtagagggatcgatcatatggcaatactagatcaaagttaattttaatagctgttttctggttatgtaggagagtgtcattgtacttaagaaatgcacattgaagtatgacaagggatgcagcattagtctgcaatttattttcaatagttatatgggagcactatgtattatttctctaactatatgtaaatttgaagttatttccaaaaaaaagtaaaacaaacagaattcccgaggtcatgagaattctaggaatggtcatctgagctatcaggagaagctgcttccacacatactggctcttgttttcgttgggttttgttacataatcctctgaggaggcatggttctttcagtccttcacctgaagatgaaacccacataaaatccaggatcttccttttatctcccttgcattgtagaagttttcagtatttaccaaatctcatatttcaccttctcatttttttttgtattaagattaatacagcagttgcccctcaaaatacttctaaggagtcaaacttggaaattaaacagatttttgcagcaaaattttgattagtgcttaatggagcattttgcttaactaaatttgcttttgacgtgatattttatgaaaaatctgttggcacaattttctgactggaaaaacattaaaaatggaagggagggagggaggaagggagggaggacagagggaggaagggaaggagggagggagggagggaagggggggaaagtttcttttttaaagggagatcttttagtacctcaaagtcatataaaatccagcagaaattgcttcacccttaatatagatgccagaagttacattattttgagtgattgatatcaagccatttgattacaatttacctgttctaaaatttctaaacaatgaagaatctcataattaaaatgttctgattaactagattccagattttaaagcaaaagaattttgaatatatatggttctattgtttgtcagactgtataaaatttgccagttttatataacaatatttaaaagtaattttattatgtgaaagcagattacccaagtctttctttaaatctactttttgaattctttattggcataaagatctgtatgagctgaaagaaaagatatttaaattaatacagtctgcctggattccccaggggagtgatgaactagcattttaattactaacaaatttaattattcaatccaggtgtgaaccatcaaaaatttagagaactcctttgctttaagcaagtacttttcatttctaggaaaatatgatgccatcaatgtctaatctagaatgcaggttcaaaaagctgtcagatttgtaatgtggttacattattttgtttcaattgtaaattcccagaacattaaatctatcaatagttgactgtaaagacaacaactaccacccaaaagttaagccctgctgatatagcccactttaactttttaccagtcttggaattacctaaatccttttggcaaaactgaaaaatgaaaagtttccttactggaaatagatttgctatgtaaacagttattagaaccatataatctgtatctataactactgctcctgcgacttttcaaatttaataaaactgtctattcagtacagctttcttggatttgcaaggctctgttagtcctcaaaataataaggcaaggctcacaaagacagatggcaattgccaagattacaagtacttttatattgattttaaaaactctagtaaaatatcaaaatatgttatctcctggagaacaacttgaaaataaactagtgaaattgaaagttaggatgagaaacgcttattaaatcttaatcttggccaaatcttgatctttatcattacagtgaatgtttttagagcttttattgggatcaagtgaaccagtttggaaatgctttgatatttatgtttggattctgtttctacatttactaagatttatgtaactatctaccatctacttagctagatgtaccattgcaagtagtatataccgtgtttaactaataccatttacatatgctttttataaatagtatcacttataggtaatacatgcgtttatctgttgtaatgtcttttgggtttgattgcttaaccaaatgttctaaactatttctgttattttaaagcattatataattttaacctatttatagtttatttcattcagaacatgcatcctgccattttttgctgtattttgagataagattttatgttaaatacatgcctcaaaagaaagattaaattacctacctaatttagcaaagaaaaaatatttaccatatgtgaagtctacctagcttgagttttgaaatccagaattttctaatccaggagaaggactcactatttaaggtgtttaatcaagagctggagaaggacagaatgaattgctgtggctgcaacttacaccagagtcacactatagtgccctcctgtggaggtttggttaaaacttcatttttgtgcccatgagaatgattttcaaactaagtgacaaagtcatcacattcaaaattgccaaagttcaatatagttttgtcatttttttcctttgcaactagacattaaattactttcaaaatataagaaacattcacagttcagaagatttgcagttcaaaatacaaaccgagacttgtcagcattttatctacatttcttattttattttagtggattttacctcaatttttacttaaatagttgaatgttaaagaggagagagcataatcagttcctgaactaggaagataaattcttcagctaacatatttacagatttatgtaataaaaagagttttcttgttaaaagcataaagattataatattgtagaatcccaaaagaaaaaataacaacaaaagtttagactatacactcatttatattcatcaaaaaatgtgcaaacagtgattctttttcaaactgttatacttccccccgcttacccccagttgaagagttaacctttttttctgaagataaattaatgctacttattacgtatttatttcaaaataatttggttcatttgttttttctctctgccctaaacctctttttacacttagtttcaagggtatgaaaatgtgaattttatcatatgtggcacgtgcacactcatatatgccctgagacttctttacacagttgtcatttgtacacctttaaaattaagtttcagtgtatacaaaattctcagatcgatggattaggtatttccttttgcatttcctcttttcctccccagcccaatgctccaccacccaagcttttctaatttgcgactgccagggatgcctgttaactattgaaaacctgaagcccaccttcactcttcaatgggatattaaacaagtgttaagaatcatagaacctaattaagactttattcaagaagtaggaagggggaaaaaaaaaacactaaaaagacttaagagaaaaaccaggaagttttacgcagcattttatgtcaacaagaaacacaatggatttttatctcttcacataaatctttttaaatctgtctcctgaaaatgggaaggagaaaacattggtttttcaaagtttaaatgtctgtaattacagaccattagctaactggcaacgttcataactaaagaagtaagtggagcgctctctgtaggaatggccattatcaaagagattgtgagtgagctcatccaaactagaagtgttagataaaattttaaaacaagaacaaaaataggatgagaaaatgcagaacagggtggaagatggtgttcatttcctttagtaaaaaatggcttaatttgtgagaccagattagataagaaacataactgagaaattcaacctaacctaaaagtaaccttaaaatgttaaataaaatttgcttagtactgcgcattcttgttgtcctgtgttcaaaagagaatttagaagaatgagatttttccaaggccaggaatacataaagttccattaatgagcgaaggtgatatctaagatgcctctttagaatagtctcaagagaataaaattgggagccagctagaaaatttccctcaaaacaatccaggatgaacccccaaaagccatttataaagtaagtaagcatcacagggctcaaagtcaaaagagaatgtgtggggctcagaacacatcctctccagaaatctaatttagtatcatcaagaacttggtttgctctcttcctagactccacacaagtctgagagcagttttctatcaataaaatcagataaagtcattgaggtgaaatcaactaagaagaggtagctataacccttaaatctttagtcctagtttcccaccctggagcaaccaaagttagacggagagctacagtctggtaccaatatagcttattcccccaccaacccctctggagcttctgttgtcctatggaggtcttgctgaaaaagacgagggccttgccttcaaggagttcaccttatagatgtgaatgttagcttttatctatcacctaagtttattttagaaatgtttttgttttaatcctaaattacatttccctctgtatttcttctgtcacatgagccatggcaaaaattgctccaaaggcttgatgagagttggagaagagaagaatatgtaaccaagtcagatgagtgaggggaagaaagggaggtttgaagaagtgctcacaattctcactcagtctttcctataattccttcccatagcagttctgaagtaatgtggttcagaaccccgaccatgtagctgaatcacctgaagcgctttaaaaacaaactacgcttctctaattatcagtgatattgaactttttttcacatgcttgttggccgaaagtatgccttcttttgagaggtatctgttcatgtcctttgcccacttgttaatggggttatttatttttctcttggaaatgtgtttaagttccttatagatgctgaatattagacatttgtcagatgcatagtcggcaaatattttctcacattctgtagattgtatgtttactctgatagtttcttttactgtgcagaagctcttaagtttaattagatcccattttcaatttttgcttttgttgagattgtttttggtgtctttgtcattcctaggtccaggatggtattgcctaggttgtcttccaagattcctatagttttgggttttacatttaagtcttcaattcatcttgagttgacttttatatatggtgtaagaaagggttccagcctcaatcttctgcatatggctagccagttacctcagcaccatttatttaataggggatcttttcctcattgcttgtttttatcagcttcatgaaagatcagatggtcatagatgtgcagccttatttctgggctccctattctgttcctttggtctacgtgcctgtttttgtatcaataccatgctgttttggttgctgtagctatgtagtatagtttcaagttgggtaacatgattcctccagatttgttctttttgcttaggattgccttggctatttgggctctttcatgggtccatgtaaatttcaaaataattttctctagttctgtgaagaatgtcattggtagtttgataggaatagaattaaatctgtacattactttgggcaatatagccattttaatgatattgattcttcttatccatgagcatgggatgtttttccatttatttgtgtcttctctgatttctttgagcagtgttttgtaattctcattgcagagatctttcacctccctcattagctgtttgcctaggtattttattgtttttttgtggctgttgtgaatgggatcgcctttctgatttggctctcagtttggttgctgctgatgtgtaggaatactagtgatttttgtacactgattttgtattctgcaactttgctgaagttgattatcagctgaaggagcttttggaccaagactatggggttttatagatagagaattatcttgtcatatgcaaacagagctagtttggcttcctctcttcctatttggatgcccttaatttctttctcttgcctgattgctccaaagaagacatacatgcgaccaacaagcatatgaaaaaagctcaatatcactgattattagagaaatgcaaatcaaaaccacaatgagatagcgtctcacaccagtcagaatggctattattacaaggtcaaaaaataacagatgctggtgaggttgcagagaaaagggaacccctctacactgttggtgggagtgtaaattagttcaatcattgtggaaagcagtgtggtgatttctcaaaaagctaaaagcagaactggtaaccatttgacccagcaatcccattactgggtatatacccagaggaatataaagcattctaccataaagacacattcacgcgaatttttgttgcagcactattcacaatagcaaagacatggaatcaacctaaatgctcatcaatgacagactggataaaggaaatgtggtacatatacaccatggaatattatgcagccataaaaaagcacaagatcatgccttttgcaggaacgtggtcggagccaaaggctatcatctttagcaaactaacacaggaacaggaaaccaaataccacatgttctcacttataagcgagagctaaatgataagaatttatgaacacgaaggaggaaacaacagacactggggtctacttgaagcaggagggtgggaggagggagaggagcagaaaagataactattgggtactgagttaagtacctgggtgatgtaataatatgtacaacaaacccctgtgacacatgtttacccatgtaacaaacctccacatgtacccccaaactaaaataaaaatttttttaaatgatatctggggaaaatgtgggaaatatcttcacttaccaattaaagggtatacaaaaaaacaataaataaaatatcttatttaaaaaaaaaaaaacaaagacacctcccccaccactattctaattcaataggtctggggtagggcttggcatctctagtttttaaatgccccatggtgattctgatgcacaaccagtggctgaaaaccagcaaattaaattttgctgcaactgtgtataatttgccagcatacgttcatctaccatctactctcccaaaagagacaggaatggaggccagttacaggagcagaaaggtagcaggagcctagatcccataagattttgtgaaaagcagagccaccatacagcttggtactgtctatttctggatttttatgtgaaggcaagataaaatactgtcaggtcaaagctgctggaatttgaattttctgtcactttaacagctaaatataataccatctaaatataccaatatcactactttatattgcttgtaaacaaatatatttttgctagtaaacaaatattatattgctagtaaacaaaaattagccacctttaatttttacatatttaaattcaaaacatcttaatgataagtccagaatcacctctattataacatattttgtcttctcaaaaaaatatgttgtcttataattgtaactaaatattattgtagtctacattacgtcttaacaattgtacaataaatgttgtagtggcttgaaccttcttgcaaattatgcacagtaaaaactatattaaatcaagcccaaataactttgaatttcaaatatatcaacttggcctgcactaatagtaaattttggtctataaaaaaacaaagacactcataatttagagactattacatggaggctgtttataaaccagctcttgctctcttaagcagaacagtttgaatttggcagcatttgttgtttatatgcaaatggacattgctaattacaagtgagttttttttttcttaagtcatttaggtatatccagaatctcaacttgtaaccttttattagcactgtcagttactataccagtcttttttaatagggatctgcaagagaactacattctacggaaaacgattaaatgactattttctgaattttctcaaggatagttgcatagctagtaagattctagatgcattggagagaaattaactcattacaaaagtggatgcctcggccatgagggataaattctctaggaatcttgctcgagaggttgagaattgctaccacttgaaagtgaagttttatttagaaatattctataattcagactgctctcaaatttagactagctttccaccaaattcatccaaattgaaagtatttactagatatggaagtagctttaattcttcagaaatttgagttcattttttaaattctatctttggtaaaagttctcatgtaaatgttataaacagcaatttagattgcaagttttaagcatgagactggtatgataacagcagtattttgagcaaagtaacttggcaatgttataacaacattttgaaatgaaaagtgattagggacagagagattaattggaaaattaggaaattgctaagtttttttttttaatgctagcatatagcaacggtaatggaaaggaatggacttatgtaaaaaatattggctgggtgcagtggctcatgcctgtaatcccagcactttgggaggctgaggcacgaggtcaggagatcgagaccatccttgctaacacagtgaaaccctgtctctactaaaaatacgaaaatttagccaggcatggtggcacgtgcctgtagtcccagctacacgggaggctgaggcaggagaatcgcttgaacccagaaggcggaggctgcagtgagcagagatcgcaccactgcgctccagcctgggcgacagagcgagactccgtctcaaaaaaaaaattataaaggaaatttaacatagaagttggtaactacttggatataaacgacttgagaagctaagacaaaccaaaatttgcacacatttgaacaagaggatctaaaagagaagttgtgccattagtataattcgaagccaatttttcataataataatgagatgtgaatataagtttagttttaaatacattaagtttaatgtgatattggaatgacaaaatataaacttccaacaaacagataggactggatatgtacattagaaaggtcattacctcaactgggagagggaactcttgtataataatctatcgccatctttgtatagatacagcttctcgtaccatccactgtgacatcatgatagaaagatgccagatcctgtctgtgtgtcctttgtgggcaggctctggacatgtgtgagtaatggaggaggagaaaccaggtttgaaatgtatggagctagcagcaagcctacgggatattcatctaaacatcagctgtgtagaaagctattcaagtcttgccatgatttaagtgacattttaagaactctaaaatatatttttgaagacttggaataaaaaccaaagtgcaaatgaaatgcaaacattttattcagtaaattttgaatataccattttaactgcaatttgggcagacttctggaatgttttagttcaacaagtgagaaattacaacttctgatttgggattatatgcagggtaccttcttttgtcatctttaaattgacttatttactgagaactgagaaaaaaattaaaatatagtggaatatgaaacgaacaatataaatgagcaatgaaatcaatagaaattaatttaacatcaagaagtaaatcataactccccaaaattgaggtcataactaaagtaggaatccaataagagggccgggtgcagtggctcatgcctgtaatcccaacactttgggaggctgaggtgggaggatcatttgaggtcagcagttcgagaccagcctgaccaacatggtgaaaccccatctctactaaaaatacaaaaattagctgagtgtggtgtgcacatgtaatcccagctactcgggaggctgaggcaagagaatcgcttgaacccaggaggcagaggttgcagtgagccaagatcgcaccattgcactccagcctggatgacaagagtgagactctatctcaaagaaaaaaaataaaataataaaataaaaataaataaataaattttaaaatccaataaaaggaagaaatacattttaaatggaagcaatgaataagtttctgcattgcttattattaattgctaacccaattaatagaagtgaatcatatgacaacattaaaaatagatttaagcttcttgcatttttacaaaaaaataactaatattgatgaaggtagcataaattgtataatatgcctttccaaggagggcatcaacacaacttggtgaatgagtgccacctatttaaggagtaaagagtattttaaattgtttcctgcataaaataacctgaaaagaagcttaaatcttttagctaatgtatgaagaaaacttgctaaatgttttctgaaattggacattaatgctaaaatctatatgatgttaccaataataagttgtgaggctgaagctttcctaaactattaataatttaaaaacatatccgttaaccaagctagaaaaaagactgactaatttttctattttttctacggaaaataatattctaatgttgttgtacctgaagggctgattagaatatgaagcccaaaaaagtagggttaagtgtattgttgagataggttaagcacttaatttttaaatttaatttttaattttgtgctatttttggaatttgtcagctttttaataaaagtaatttgttgttcttttattattctgtatacccacatttgtgaattctatggattcacttctgtacctaattttatgtactgatttagcttcaggcttcacaaaatcttctctggctgctgtttgtacatggttcttaccaaatgtggggaagcagggagaccaggtagaaggtaatggctgtggtctgagtcacatggaacaggatagtggcgtggaaggtagagagaagtcgatttcagttttatttcagaatatatatgacaggacttgctgaaaaattgggtgcaaagagtgagcgaaagggaggaattaagaatgccttccaggattcagtttgagtagctgcaagactcggggggagacagggctgagtgaagaaaaaaagcttctttgccggggacattaagcttgtcatgttttctccatgctgcctattgtattgtactttatagtgccacccacattagactataaactcaaagagggcaagaactgactgctttttactctcatgacataagatttctattcaattgaatttaacatgtgttgcacgaactatatgcaagatgctccaccagaaactagattcaaatcctttgactcaaactcaaactacaaagaaaaaaaaaggcaagtggataagagcccagatttggaatgagatagaccagacttagcaccttagttctgtcacctgctaattgtggggccttggaacagtaacatcacctctcagagcttcttgttcctcgtctaaaaatgagaatgattatccctgtcttataggattatcacaaagtaaaaataaaacaatgtgtgcaaaatgcttattacagtgcccagcatacattagcactcaataaatggtaggatgtacttgcatttggttttcctgccaatacagacaatatctatagcacagacatcacaaaatcagtgtactagaaaatgttgagagagaagttatttttttcagcataagaacatatcttaaataatttcaggagaagataataggtttctgtactcttctagtcctgaaaaggagggggactaaaaggcactgtgagcaaaaatagaatgaatttacccaattctttactgcactatttaacctctgctttcttaatcatatgcacagcaggggaaaggatgtgctaaaacaattcatgtgtcatgaacaaagcagccgcagattttagctcaaaaatcacactaggaaaaccaccagttgcaagtaaagtaataaggccaaatttatttttttcattgagtcttgagttacaagcaaccctttaattacattaatcaagcaggcttcctctcaacaaatgaagggaaatatattgtcctaacttttgctaaacttgttttttaagttgctggatattacttggacatatggaaaataaatcccttgatttcttttttatatttttctccatctttcaatgtagccatagcaaaagacaaacatatacttacttctagacatgacttactctgtgaaagattgtaaatcacattttaaatttaaaacatttacatttcaatatttaaaacattagcactcgactaaatttcactttaatttccctttccatttttctaattttttgcatttttatatatgtttctaagaaaattgactctaccaattggtttactatcaatcagccggtcatttgtcccatttaatggatggaaaacccaaggcttgtaggagattagatgattttcccagaggtcttgtagttacaaaataccaaagctggggctgaacccaggcctgtttgaccctagcttttcaccagtgtcacacacatcttttgttctagaatgttctccgtatgtatctgttcatttgtatatgccacttcctctgtctgtctgtctatctggtattttccctccctatccaaccccatctgcatgctaactcctatttctcctttgagattcaactcaagcaccatctctctttttaagctttctctgaatcccttcttctcttccctcccaccaaaaatcaattggcaatccttcttctatatttctagaacactctacatatacttctaataattgtttcattcttcaaattatgttattcctaccaagtgcccccaccacccacacaatagactgagacctcctcaaaagtcagagcctttgtgttgtttgtctctgaatctccatgacctagtaccgtacttggcttggagtgcatgttcagtgaaggtgaaaatgataatataaatgagagtttataaaatataaagttccttgttttctgaaaaaatatgaaagctttaagtaattgctaagagtttaacttaacttttgacgatacacaggatttatagaagagggcaggaggaatgttaaaatctaaaacaagtgattggaaataaatcctgaattgaattgaaatttccaaagtataacattattacaggaaatgtaaataaccttaatttatatttctatcattgcagtcatattttgagaatgcagtgaaattgttcatattttatagtgagggctctaaacgtgtacattaaacattttgtgtttcctggcttttaaaaatgattactaccctgtaatttacactttgtttaagcaaatgaacaaacatagcatcattttaatcagggtcatcaagcagctcagcagcaacccatttgacctaatatatcattaaacttgtttgagccaggtggtagttctcaaataaccacatacaatctcagtttgtgatgaaataaaactagtcttccagtacatggcacacctatgttggctggcatatcagccctcctcacactaggaggtgctagagagtcagacctattgtcctcaaaaggagagaacatcagccctggtacttattgccctactgtatcataaatcagcttaggcgctacctaagaaaaatggcaaacaccatagaggtctaagtaagagaattaagttaaataacaccagcaattcaataaaattaaaataaaatatggcaaacactttgcaagcaaggtgaaatgtatgagttcgtttccaaatgtgcgctatattctgcagccctatatttccatttgctactttttccttgaattaatgtctagtcttttgaaaggatagcagcatttcagtgctattcctctgtgtatacagtcagtaatgtttgtcaagagctttggaaggaaaggactacataaatgtcagtagttattaatactgggatttttatatctagctatcaaatgtgtttttcatagtctatgaccagaggtctatttgtatccatctaactataaatgttttaagtaaaaataaccactgaccaacaacagtatttcttctgttcttctttataatcaaagtaatatttatcagaagttagcaattacgctcaaattcttccagagccaagtttattttgacatgtttttatattccaggtcacttaataccacttattcctctggctttgggtaactattatgaggctagttgacaaggttgacaaggtccacttacaaaccccactatggcctccctgtccttgctcttctctttgtctggcctatccctaacaggtacattgttttgttgtcagctaaaatcagggactcacccaacagttctctacccctatggcccaactgtagccgtttttatgtagtgttacaaatgaattgtgcaggcatttgtatccctgccttcttactccaccttcagactgtaactcttttgaggcagaaatcctgcctatgccatgttttgcacatggaacgcacacagatcagttgaattgaaccaaaatctgaatcttacgcaaaacacaagagactcttcttttaaacgtgtgatgtgctgcagcataaagcttactggcagagggtcacagcatatccagcaagatggcttttcacttttttctcaaatgtatttcaactccattttctttgaaagacccacagtgttctttaaaaaggaggagatgtaacagttgggttgacctacaactggttctctgagactagagttcaaatcttagtttgaattaaaaaccaagatggatttgaaggactcttaccacaaagcctatctgctaatgcatttttttaaggatcacaccaattaccatgtttgtcatgtactcataagaaccagaataggtcaacatatattggctgagttacacaaaggagtctacaaaatataggcctatgctctttctggctctggccagcaaccttagcccttcacttttatatgcactaaattttactctagttttaataataatcacaataaatatattaataaaatcatgtttatataagaggttcatcttgtttaaaatgcactgagaatcatggtgctttataggacacaatttatgctctccttggtaatttaaaggtgataacttcatgtgattcattgccacctagttctgaactttaataatataatgactcattatgatttttacatttcttagagaaccagcttggtaaaaaacttcgcagttgtttttactggggtcatctgaactatggttcccagaatgtttatgaaaaaaacatgcttatatattctgaatggctgtaatctatcatggctggtgcttggtctgcagattatgagtgtacagtgtcaacccagtgaattaaagctttgttgtatatcagcttgctacacaattatttccagttcatatcatataaatcatcactcttcacacgacaatcagtaatttccatcttgtgttctaagcatccatgttttgtcttaatggctctgtctgattctgcacctagaatggtgtgacaggactggtactaatagcttagaaaataaatttcactgtcactagagcctatttaaggaatattctatgttctcactgttttttgtaaagctgttttgtatatgttggaataataggaaatgaatttaaatagaaacacttctcatgtcttatctctgcaaacaaaaaaaaaccataatttacaataaattagcacagcagttgttagtgtagctcagctttattttgcaattctcacacctaagctcacaagatgacactttttctgataaggtaatctttataaggtagttctgtaggtgattaaatctgacagatgctagtaagatggtgaagttcagatatataacagcaaacactttaaaaaaatcttgttaaaataataaaatgtcttatgatctaccaatagaaaaatcgatctgacaaaagaataaattagttataatgttgtatttctgtgtctaaaaccaaaatgaaattattcaccaataagtagataaatataccaattataacaaaatacactgcaaggaaactggtatttttagataaagaattggtgtggtaatattaccttcccagtcatttcatagcatttacacagcattgttgagcagaatgagaataaaaagcttctaacacaaacagaagctgaagaaatagaatgtgtcatttcataacattttgatagtctatctgttcttcaaaacataccttgcataccagatctttcaaagttacaaccttcatcttttcctggggcaatgacgataatcatttggttggtatttccaatgatactagcaatctgaaatatgttaaggcttaattgtagattgtataattagattaagccaattaatgctgtggcttggttttgcaatgttcctttattatttgaatgcttttagccctggtttcttgtttctagcagaatttcccaacagtagctcattgtccttgcttggttttgattacttaaacaatgttagctttgccagagtcgattgatacttcgatctgctgaagtgatatgttgcagaatgtgctgttttctgattttcttatctaaatattagttgcctaatgtacagagttaatttataaatactgggaagttccctgaatcaagtaaattaacatactgggccagattcaccagcttccttagcaaaccctcacatcaaggctgtcttcatgcaagtgtgaaaaccagaacgacccttcaaaagttttcctggccagaataactctctcatcagataataggctatactcatcctaatattccagttttatcaccacaatcaattcattctacataacttcacctagcatggacactttttggaagaccattagcataggatgaatatggaaaagccaaggagcaggattggacacccagatgaggagcagcctgatgtataggttgtattggggaggtgaagagcagggagatacaggggaaaaaaaaaaccctaaaatttggcactattaattaagagactatataacaggggaaaatagcaatagatagtgacttactgaccatataaaactacaattatttcctacatttaattctttagtaaatatttattattttcccactatttcttagctacctgccaggcagtgaagttgggaacaaaacagaccaagtccttaccctcagagagttttgtttagcattgttgtagacataaatatgtcacatggaaatttaaaaaacaaaaagcctcacacttttaagctttttctacatgccaggcactgtgtgagtaccttccacatactgatttagtcctctgaagaaaacacgcagtgggtgaccactgttatggccgttttctagacaaggaaactgtgacccttgctgcagaactgtgaatgaatgtgaatcctcagagagctgcagttatgcctttgactagtgacaatgacagtgttttgacctagcagatgatacagcttttttggtgttagagttttaaaatagtatttgtgcagtaagatcgcattctctgtttcccactcaaaaaaataaattattcaaaccacgaaaataggtgcctaaaatccacagggcagaagcagcactctaggccctgtgggaccactgttgagaaaaagccaatgcacccctgggcctctgttagaagagtaacttggtacagctgtataattccttttatgaaatggatgggtctgatcaggaatcagagcctcgggatggacaatgagactcatccacaacagaactaatatcttattcacccaggtttgactttaaaattatatcagccatgaaaattatttcactgccttctgtggtgaacaatcgggctatatttaattttaatcattaatatgtaaaaataataaaagccaccaaaatagtctatagtcaattttctgataaaagtaaatttattttttccccatttgtgatttaaatggcctccagaaagttttttgcaagtaagtgttaattaaaaatatggaaatggatttaaagcacattacagtgcacagtggaagaataatcacaggagctttggtcacacgaccatcctcattcctctatgtattttttaactgtctaggttattggttgtttttctgcatgcctgttcctagagaaaactgtgattccaatgaaaacagtggccaaaagcaaactgatgcccctacgctttcctgtttacacaaatgaaataagcgtgttctcagatttctttatgcacgcaatgctttttatatcttgccatctttaaaaactattcaacctttcattcttgactttcattgacttattttggaacaatgcactgtagttagtgccaacactatgtagagccagtgaacaaattctctttctgaatttatcagagaatgcctgctttcacaactctagtatacacatgtcattttacttttctgaacctgtatttcctcacatataaactagagataaacattttttggaatccataatgaactactagggttccccttccccctaaagttaggtgcgtgggtttcagagtcagatagatccgggttctatttctgatagaattctccattttctagttgtggggcattggctgagttatttaacctctttaagcttttggctctttctcaaaacatgaagtcaataaaacctttcctcccaatgcagtatgatttgaaggacctactatttataacgtgctttctaactagcccaatgccaaacacagagtaagttctcaataaatgagagctgcttttttttttttttcatcatcacagtttatattcccaaatggtggccagcactgaccttagggcctccccattgaacaactccagtgggtacctttcacattgtattgtgagtgggggaccagaggaggctcacggaaagcaatgtgaatcatggcccctagagtcaggcaacttatcagccctcctagaaatttgcttcatgatgttactttcattaggagctaggtgaggggtatggtatctctgaggaactctttatggctttaaactacactgtgtctaaaaaacagtttaatgataagtcagttaaaaataactactgggccaggggtgcagtggctcatgcctgtcatcccagcactttggaggccgaggcaggtggatcacctgaggtcaggagttcaagaccagcctggccaacatggtgaagcactgtctctactaaaaatacaaaaattagcctagcgtggtggcgggtacctgtaatcccagctacttgggaggctgaggcaggagaattgcttgaacctgggaggcggagtttgcagtgagccgagatcgtgccactggactccagcctgggcaacagagcaagactgtgtctccaaaaactaatagtaactatcaatgaagtcaaatcagtgagaatctgtctggttgtttggcattctgctaatcaaacaaatactctagggctccattgatatgaaatacagatagttgcactgatgcaacaatacaatgactaggtttgcttctccaagtgttaccgtttttcaagaaaaatatttaaactgacttgtagctggtctaacaaactaggcagccctgaagatttttagatgaatggatagatactctgatgaaatactcaacatccaatgaatgccccccgtgtataaaggcctgagctaggggtccttaagatgaatatgacgtgccccacgtcctcgagttgtttccacacaatggcgagaaatcactctacctggctgtcactcaaggccaatgtgacaaatactatgaagttgaataagcaagatactctgcgagcacaagggcgatgacgagaaacttcacagagttgattgagctgggtggaaagtccaggtggatgagatggcctggcaggatgcagggaaaagctcccccagcagagggagcagcacaggcaatacagggctgagaccacagcttcctccaccccttgctttgcttcgctctgctttgctttgccttgctctttttttttttttttttttttttcatataacaattatggagcacccactctgctgcaagcactgggcaagcagggaaagagtgagtggtctagtacagctggagctcgagatctgtgaaggcaagaacatggagttgaatccttcaaaaaatagaagggcacaggtgggacaggcatcagcaggtgcccccaatgagttttatggctgacttaatgttagggacaagggagagggaataactgaagacagctgcaaggctttgagtccagtaactgagaagctggtgatgccaccaaacgataaaggaattggaggaggagcaggtttggggaaggtaattaaggaaaaataaatggacaagcttcagcctgtcaatgattccagtaagcactaaatgtgtactccaaatattcttctacatcgtgactgaaaaatactgaatctggggatctacacaggcaagcaactttgagttttgtataaatagagaaaaagccacttgaaatttagtaacataagatacaacatctgtagctggactagagacgacctagtccaactccctaattttacaaacaaagaaaccacatctcagacctactctcaactgagcagcagagccaatccagaactctgactacacatttaaggggaaaaaaatctacatttttagaacattcaaatctggaatcaagataccacctagatttttcagagctgctgctatttcagtttgtttatttttaactaaactagtatgattcgcagactgtaggtgaaaggtctcttttgagaacatgtattgctatgtacaccattgtccacaaaatcagttttgtagttaatttctaagatttcagatttcaagaaaagccagggaaacttagagtacctagacccattctgtataagggaagacatgcttctttaggtcattgaaataatgacatctgccatatatggaataaaaggctgccttgcctaggaggaagggcttgggtgctcactgaaagtgtcctgtttctagaatgccaagcacatatgactaattggcagtagtttcctccaaagcaagaaaatcctgcctgctgaccagagaaaagtgcctaatacggttaaagaatcactaagtgagacttttttataaaaaaggaaaaaaaaaaaagggtaggggctagggagagctaagcagagagggaaatatttataactgtaacaacatgtttcctggtaataatttatgagcctactggagaaaagggaaacacacaaactatgaataaaatatctaaacgtaaacatcatgctttctgcaaatttctttagttaaaaattaaggctgaggttgactaaagtaaatgactgcattttcgtggtctcttatttccttgatgctaagggttaccaactgatttacaacttcctgtgttgttttttaaatctatatttgtcagcacatttttaatgtcagattacttaaaatagacatcttggctctaagaggtcagaaataataatattaggttgacttctctaaagatttcatagcactttacaagtattctaatttagcaccaaagctttttatttctaaacgaatatggttttaagaagcttagcccccactttcagttgtggacttcgggactgaagtgcagttcaatcagtatgctttgaagttaagtaaattacatgatagctttatctaaatagtttcagcctcctcctattcaggtagtttcaactgtcaacaggaagtgcatgaaaaaagaaagactcgaaccaaggacctagagttcttccattgtagtttctttctgttctaaccattataatttattatctcatatgatttctgcaaattatcggtacttattcaaaaagagtattctctaatatgagagtcatgaaatagcttcatcttcatataagctgtcataatatgtaatgaaaatgcaatgtccataaaataaaatttttaaatattaaacacctcaattttaaatagaacgctctagaagaaactaaccaaaaatctatgattagaattgtttgaaatattttatactgagttcaagggtatgccttgaacctagtaagctaaacaaatatactctgagtggcttgtaaaaaatattttgaaaagcattcaatttttttaactatttataatggaaccatacttttccatctctcaccctgaggaagttgcaaggtaaggtcaatctaagaatcaaaagtacaatgctgaatttagtagttgaagagctccggtatttcattttcacaagagagacgtgttgaaagtttgccctgtaagccctgactctttacttttgacaaaatttgttaagggaatcttttaaaaatgaatgtaatcagggcaaccacaggccatatttgaaactggaaaacaaaagataaagagagtgataaattgggtgggggaaggggagaggcagattttctaattggaaagttaggtgtaaacactctccttttctaaataggtggcttgccctaatcctgatcatgctacatatctacctcattatgtcattctatctaggtctcaaaagagaagttgtttgggaccaaggaactcttcaaataacgtggtattgaatatatgtttgatactttaaagactgtcactatatggaaacagagtgatagcatgtcctcattaacaaattcttcccagttaattgggctgcttgagcagtgttaacaattacatataaaaatagcatggaccagcatcctcaatatggctattctagtctgtctttcaatgatggcattagaaagatgatcctttcaataataacagtaattataagtaataatagtaatacaccttgaggtttaataatactttccctttgaagaactcccagcattttcatccacattatctagtttgtgcttgaaacaattcgatgaagtagccaggtagcaattatcattatcctccttttacagataaataaactgaggcctagggattttcttagcatcccacagttaggaatagagccaagtctaaagcctataattcagtgatctatcttccagattattgcatctttagaaaatatctgggtatctgaaggactgctctatccctcaggaaatgtttgcaccacggccagatcaaaacatcttttccttttaaattgcatttacactacaagaaggtgctccttttctgattcattagagaggattttattgtctgaggtcattaaaataggaatactcagatttctttccaaattgtagtattggccttaagcaggagtacacttaaaaagtcaaaagatatctaaaatactctggaatcagttactttaatcatctaactttttaaaaaatgattatttgaagcccaagcgaaacaagatcaaatcaagagataaataaaaatgggcacaaggtgttaactggagtgtcctagccagattgcaaattggtttactgtggcctgccaacttaaatttctccttgcagcttcagctggaatgggtaatcttcatttcctgtcctaacttgttgtactgtgttaccgttcactgtttaggtgattagcatgtgtggatctaatggtctcgaagctctattaagttataaatgttcaaactaccagtatgctgtggataaaaatagaacttgctattagatgtctattcatactccgcagaagcctggcaacattttgaaccttttcaaaatgtaaatactgcatattaagcataggaaagaaaattaatgtgctgcatttgcaaatttatttccaagtcaaaaatgcaaaggaggaggaggactcttgttagcagaattgatattctacatttacagagtatattaagaagtttgtaatggccctatcacaaaagaaaaatactttaaaaatggattaattagtttctctgataatgttggcttttgaatttcctcttttcatttaaaatttatggcctcagtatgacattactagagtttattgcattttgcaggtggcattcatatgttgctactttatgtgccatatattgtgggcaatgggttgcaagtttttgttaaaaatttccagaaccacacaagtacttcttaattagacttgcaaatgagtaatgcctttcttcaagggggggaaaatagttaaaacattacaggaatttctgtgccttttttcccttagttaatagtcaggaaagtttgcaatcaagtttacttcttgaaactttgacattttatactaagttctgatttacatatgaagtcatcatctgacaattccaaacaaatgtctttacaaagcaaaccggtattttgtctatgtgcctatggctcaaaaaagcttgagcagatttatcttgctttctgctgttcaaaatagtggaaagttgtaatctcaactgcatatttaatatctcaaaaaatgtaataatagattttaataatttaataattatccccttagtcatagattttagtggcacaaacactacacgcaaatcactatactttctccaaacaagcattactaaagtaaaacaatacatcagagctcatactattgataatgttaacacggaaaatagaaaaaagaaagcataaagtgataaaattttcagataaaatctttataccacttctcagacatagtaagatctagaagcagagtctaattcctataagcatgtttttagatccaaactgactctgtactttgttccaagagagttcaaaattcttagtgtttattcccatggcggatgtccatttcatcttgaatatgcaaatttttaaaagatttcttacgattttatttgccatgtaaataacgaccttgattttttaagatacataacgtttggcaatgaaatttcatactgacgagtattaaattatgccaaaaagccatttacttgatattcttcaaataccatagcacaattcaacttaaagcacaattcaactttaaataccgtagcacaagtcaagtaaagatgtaaaccatcttaaataacactaatgcaatgtgcacgtaatgaacaatataactaacttaattttcatgtaacagataacatctgggggaaatgtatattggcaagttatgcaaaactaattttctagcaaccacatctgtagatgttatttattgtatgttcacttaacagtccattattctgtttagaaatctattctcttctttattagagcttttaatgtactcaccttagttcaaatggtctgctcattatcagaaaaaatataaatggcattcacatggaacaacatgattgtttttattatatccatttgtgttcaagcattcaaaaatggcaagagaaacacatttattgctttacattcaaagtactatttagggggtatttgaaagtcaagcaaaaccaatcatttggcaaaatggatgtatgtgtataatcagaaactcctgatttttaatctcagcattaggcctcaggcaactcacctaaaggccttccctttgtttcctgatctgaagattatgggtgctattctcatatagaagaagggaggttgctaaatcagggtaccaaataggagtgtttttttaataaacattcttgatccttttctgtttttatttttccagatttaagaggtaacatattagacttttgaggaaaaaaaaatgagacaattacaattctacaggaatgtataaaaatagttataaaactagctttatttaatttgtttcaactattcatagacttgaggaaattataacgttctttcagaaaatctaacttaataaagctgaccatgtctctctgtttttaaatagattttattacagaaccagtgatgttgtaaaacatgaggttttgttaaaaaaaaaaatacaaaggcctaattgtattttttaaagaaactattgcatcagacggtttcatttaaacgtattttctggctctgggctctcaccacaattattgattctaattttccttaaacttgctttttaaaaaggctaccatttttaatgtgaaaaaaatcactgtgatgcttctgggcattatgtttatttcaaaccatatatttgataatgtactttattattattaatgaaaagactttatatttaccctcatctgaaattgggacatttctttcccttgcagtatctcactaacacagctaagtgtaattcttcataaaggagaaaaactgagctagggtttggttcactaatagtatgcaaaacaccctgaagaaaagaaattctcaccccccagtttttgtgcaccaattaaatcaaattaatagttatatgggctacactcataaaaatcaaggcaaagaaaagctcaactctcagtcagaacttcaggttcttgggagtttcactccaccaaagaaatgatgatgtggaagctgggaagttccaagtttccaagtgtgtgcccagtacacacacacacacagacacacacacacacacacacacacacagtgccaaagaccaggaaactgggtagttggtgagtcattcagatgagccttataaagaaatccagaggacagggatgtgagggaaagaaatgagagaattggacacaaatacctgcttacatttaagtgtataatgtgatggggaaatgggtacaagtagaaaagggccagtggtagaatctgctactaccaggctagagaggcaacctattgagaacttccacagggggtgagggcaagtgagcaggaaggcctagcctgtgtatggccaagcttagcaacaagacaaatatggtgacagtagaccagaaaaaattctactgcattaaaaacaacacttttaccttgcagattatctcagtgcctgcggtaaattcagtagactccattcaattcctttctctcttcttttcaacgtctcactcatccccaccacccccactccaaacttcctgttccttggtgtatattaaagtctataccactaagtaaatacctcatcatcttcccttgtctctgattcccatgtgcagcttatttattttacctataatgtttcagaggccgctaaaatatgtttagctgtctccttttcctagcttggtaaaataaagagcaatagaaggtaaaggaaggatgaaaaacaagagtgctgaaaaaaggtacaaatcatttcgtgggaaggtgaaattcttgtttgccccatttaggaaaaatgcaatggctcgtggaagtgcataagagaaaagaactgttctgatatgttttctcaatattctattttgattaacatttagttgacttaagataaacaatctggaatgatgtcacctaacagaataaaaattaagtgcttgataatagcaataatttccaaatatggcaacttaatgacgtattacagtttactgaaaaccacaaaggacaagaagtcagcacaccagggtttaattcccagccctgtcaagaagtaattatttgaccttaggccaatcatttaacctcttggtttccaaatctttttgcctataaagttaggacacgttggggcttctatatatttacactaagcaacaactttgtataaaatcaagttaaaattaataatattaattcaatgcaaaacacataagcatttgtaagaccaaaaacaaaccttagcttccagcgcatttcaaaacttatctaaatcaaaaacattaatatttaaatgatgacatgtaacatatttatttgaaatattgtagagacattaaaaatgaatgcattattatttcattgggttttttttcaggcttcacaggatgataattatttcgtgaatttatgcattttcaaaattttgtcttcaaacttatgtttgaagctctaatctcagggcctgactttgtcagcatactgtgggtggcttcatccctgggccacaataacaagctcctataaagcaaaacaatttaccagtttacaatgaggcatgtagtaggcatgaaaacgagaaccctcaagtgggcacgtctctacagatcaattgggatgggaattgaaattaaaatcaaatgttgcttattaaacatggaattagaacaactaattaaatgaatcaaatgtttaatgttattaataccctcatctcccctttccctcccccaagtcagagtgagatgagcactgccaaagttggcttccttgactctccttttccttcatttccagtgttaaccaaccgtcagcctccttctgagtggcacgctgttgctaaagaattgttaaatactcatagtgaagtcttgccttgccctgtgtgtttttgacaaatctccttcctgatctactggcttcatatattaatctttgcagcccttattgtcttcatcaccaagttcttgatggccacttcagcagctacattctgctgagtaatagcagtccccatcaggatgacattaagtgtattaaacacctaatcctctgccagaactagagaagatacacagagcatctaaaacttggttctccacctacagagggcttgtagtcaggagaagggggatactgaagcacaaaacagttaagaacgaggagatactacatgaaatcctaaaccacagagtatcgaaaggaaatgagacagtgggaaaacaaagtgttaattttgagaaatggagctcaaaaagcactagaggacaaaaagggcaatggcatcaaaaattcaaaggaggtggcacttgaaagataacagacttggaactatggtacatatataacggaactgaccgaaactgtggttgctcaccaaaggctctgtcataattcaacttttttcttcccatcagcaagtgatagaggttgtcaagtctgcatgtggccctttcccaaatcctctggaagaaggaatctcatttgatatttattcaacattcatagagccccccacaatattggatacggaaatgaaggtatatttctttttgtctttccattcaccctacctcatcattatattctcttggggtgggaggaaacgaactaaatgttttcttcattttctttgcctctgatttttcccaaccaaatacaaatatttctctaagtgttgattcaaagatgagtccgctgatggtagttcagcaattttaatcttttccaccctacccttcctaatctccaccttcactttcccctgggcaccacattggtaccatgagttgatctgtcataaccctcatgaacaggaatataaatacagagtaacatcatatcaaaatctccccccagattgacattgtttctgctagaaaagtatccaatagaaatttgaggttccaatgagaacacatggacacagggaggagaacaacacacatctgggccatttggagggtgggcaaggaagggaagggagaacatcaggacaaatagctaatgcatgcgggccttaaaacctagatgacaggttgataggtgcagaaaaccaccatggcacacgtatacctatgtaacaaacctacacactttgcacttgtatcctggaacttaaagtaaaataaaatatatttaaaacaagaagttttaggttccatataaatcaccgaatgctctagaaatcacccgagtgctatttactttcaatattctagaggttggatcaagaacaaggccctgaggagtctcagccagaaactgacacctcagacatggatcctttagttggtttcaccattgaagatgtaaaatcagtgctggatcaagtcacagatgacattttaatcggcattcaggtactcagtattgatagtatgctcacttactttattactggttaattagccaaccttaactttaatgtctataaacactccccacactgccagcatgagcgatgcttatgacgaagttcaatttaacagcttcacataattctcagttgagtcatcagagattcagtaagatcacaaaatagattttccaacagcatctagtgtggtgcatgttatcagttaaaaaaatcaacaacaaaacccaaaaaataacatggtaaaggcttcatatcttgtcaaactgtaaatgttgcttatgcaaaaggaattggaatgcatttctgaacggtaaacactgaagatcaaaccttaatcctcagctaagtcttctcaccaaatttctaacaggctttcagatctttgaactgcctctcagacagtttgttccttttgacctatcagtaatggctaagcagtttacaccaataattacatgaacatggtgatggcagcagccgtatgaatagcagctgccaatgatttattaactggcttaggtttatgcttaattctttctcatctcattctgttcaaaaaacaaacagccatttctacctcaactcaaagacttacaggaattcacataatttttcaggccaaatgattaaataagtaaaatgtatattttgagtacatttgcaatttatttagaaatggctataaatcaggagggcaacctagtgcatatttaaaatattaatgcatctcaggagaagatttagttgtcatctgaacatgagaccatatattaaaagcccactgtattaacaactaatttaaaaagagcaaaagattagcttggcataagcataccttgttacttgtttaatcatcaaatgttattgcactatttacacgaacatttaatgatttggtgccaacagactcagccaaagtcctcagcttaataaggggtgtttagtgtttaccagaaatagtggaagaacacgttttacacaaagctttattgttaacaactccatgaatgtaataactggttattgtgtagaagggcagagagcagttgaattaagctgagttcagaacatatctcctttttagatctgataacatttcatctaaatatagtttatgtataatcatggctctgggctcctttgcaatcctacagctctgaaattattgccgaggaactaccagacagtaactgaattgtttgcaggcccaaaaaattgaaaacgtctttaccaaagctgtgttccatgcagtgaacagtatgttttaactattcattgaaattattttaaatattacagtctgcagcatttatacccctattctatatgatagctatgtgtctgtatgttatcttcccattggcctgaagccatcctggaagttcaatagcttgctcacctaaatgtaattaggcatggagaggatgtggaccagaggacagggatgcagaaccgctaggtgccacaatcatttccatagtaagtggatttgtagacatcagcctgggccaaattactgccaatttttcaatgaaatagcatgatgatgtggatttatacaatggctcaagatggcaaacccctttatgtattttctatcagtaatcctagtaaactccatgtgagttaggcaggcacttcccctgataaattgaaaaatgggacacagaaagacttaagttatttgtccagagttcccagggttgacaactgataaaagaccctgaatgggagctgtgacctgggttctagttctaattccagcgttatccacaaaaaccacataacttctaatatcacaaccagactactctggattttaatactcccgtggtgtggcactttttccacgtttacccttgtgtcttggtcaaattccaagttgggtaattactctctgcttacctaaattcctcctcctattttagatgtgtaggttattttccacttctaaaacctgccttccagtgttcctggctctaagaactgccatatcccttttcaaaggtagctatgtgtcagtggtcagtgtatatatgctatttgaacacaccgacctgctgtaggaatatttaatgaatcactactcgtaagatgttttaaattttctcacagatttttttctcctactttgtttaaaagtcatactgttattacaatttttgcaaaaaaaaggcagtaaataattcatgttttaagtacagttgttttcaaaattccttttctatgtggtttcaggcatattttaccttctctaatacagaaatttctgaaaatgtagtatgaatccataagctttttatgttaattcacttattttcccattgactcactttatggttttagagatttattaagaatgaagttatcttggccctgagatgttaattaaaattatactgaatagagcaaacattttaagcctgtatagtttaggtattttaattttaaagatacattcaaaatgaaattattttggccctgagtcgtgtaataaaaattatacccaagggagcaaacttaaatatatttaaagaattacatttcagagaaatatgaatgctaacactaaattcttacattacatgttggctgttggccctgtggaagcaatagggtaatataatataaaaactttgagggaagtttgccatcttgggaccctagatgtttttaggtcaacttgaattttccaggttagaaaagctgagcatgagatcatctcaaagaagtggtcaatgagagactactgaacatattttttttccttaaaaaaaaaaaaaagaaccagacccaaccatagtatttgcaggattgcttgtctgttcagcaaagttctgaagaatgacaaggaaacacggctaatgacagcctgttattgactagacgtggagcctttagatccaaactctgctggttgtgactgaactaaagtactaagcctaaggtctggagatctgagacattactcacctctgtcagtatgccactctcttagctgccccttcatgaaccttttcccaaggcctacacttgttttgataaattctgtctcggtaaaataccagaaaggcctccaagtgaatgtaaaatccctatgtggtagtgaaacagaaactggtagatgataagcacatcaatccttagctgaaaagaaatgagattactggtgggcatagagggacattaattgaaagtgggaagaatcgattgtttgagtggcgcaattcttcccaatcctttgaaattgtggtaaaattatttcaaaccattttaatccctatgtggtccaatatgttgtatcccataaatttattttaataaggcaggagtaacagatttttaagtatttcatgacatcataacaatgaaagataacattggtgaagtatatcacaaaattggaagttggaattatgaattcaaaaactaaagtttgatattaacataatcctattcccctacttaatttttaaggtaagagctaaaatccaggtggtgaaatgacttacctaaggtgacgtagctgaactagtacctagatcttcccagtccaagatcagtgcttctttcgaccctacctaaaatcatgcatagatgatgatttctttagagtcagtgcatcctaaaggaagagttcctctgtgacctggaggaccgctccatccctccttgcctcctccacccaaccaccaagaaaggaaaagataagaaaccagaggccggagcttgatcccaaggtttactaaagcttgaaccagaaaagactgatacttatgtgagttctgaacccagaattgttggcacacatacgatctttccagaaatatcaaatcttactgtgaggtgaaatcaaatctcatcagataaggcagcatggacatgtcacaactatctgttatagttacactcttgtaaataaatatgaaaaattatatctgggcttaaaacagtatttgatttttttaaatgtcttctatctaaattaaaataataaaaggtttgcaaagtacagttaccctgaagccctcaaataatgttatagctattagaaatccaaactttgaatttattaacacatatgtgtataagctactccttatacagcggtagacattttaaaaatcacctaaacaacaacaaaaacatcaattttgccacgtcaaccaccactgctttttctgtatgtaattttattataccttgtgaaaaagggaagacatttccagggctactaatgttcagataatgtgaacgtatttatggaattgtgcaggtagcaatgtgagtccacagaagatcgctgccagaggcaaaatgctatcaccacctcggcaatcacaaaacctgagagcaattgcttactttttttaccaaaaatatatcagaaagtggcatcattccaagagttctaatgtatgatgaatactcttaattatgggagttgttctaattgtaaggttatttgtgttgttatttcacaacagaagcttcctgggatctcatttagaatgtattacacaggagacacagacatccattgcagatggtggagggacccacagcactgcaataactgagcccaaagcagttattctgattcagtgcttattggtaaagtctgtctgaaaatacagataaattatcctatcttccaacacaaggctttgtgaaaaatggctgtccaaataccacttcctgttcatagcagacatgctatacattggaaatgtgcagagaaatatgataaagtgttatcacatcactacaggctgaaacacagctatgtctgcaaaacaggaaggtgtgtgagggataatatctgtctttaggcactatagtatgtcaaaaccacaaagacaatgtgcagcaaaagatagctccatcataaccacgttttttatgattgtcttcacagaccgagataaacgaaaaactgcaaatacaggaagaggcctttaatgcacgaatagaaaaattgaaaaaggcctaaggacttggtacaaggagagtgatgctaaacttcacagaaacaaacaaaaccagccagaataacagactctctggagcgtcgtgtctccatcacttagttgtgaaaggaaaaccaagccccactttttattttcctaagtaattagaaaagtattggtcccaattttgctatctcccatcccataacagcctctgaatttattgcaccaagtgtaatgagaacattttgtatacaagagtttgaaaaattatatataaaaatacaattacttttatgatagtcctttgacgttttgactaataaatcctattcatcttcaaggagaatgaagtcaactttttaaataaccagaaataaagaaagatgataataacttcatccattttgacccaaacggactgccacgttactggaacactgtgaaaacataccagtaccacactattgaggataaaatttgttaaacaatagcaattcaaatgcatatatgaggtttttttttttttttactgaaatcatttggttttcttatttaaacgtttcagtgtgaaaccaattttctgaaattatataatgcagtttgaagcactttaatttattctgtactgtatttgttatttctaatcttgttactctcccaggagaatacatgacctatataaaaagaagcaatgtataaatggttattaaagaccaacctatatatagattgtaaaaatcttaaatacaaatcaaactcatagagttcccagaattagccattatattgaagtggaatgatttttaaaaatctcaagtctttaaatacctttattaaaatataatttcaaaagaaaaatatcaatttgccagctgattgtccccagttggacaaattaattaattactaccgaactcttttccaaagttcttatacttcagagtttactggaatggagagcattgctaggaggtagcagtttcttcaaaaattttccaggctatacagtacttggatctgggtgacacttgattggatatcagctttaaccctactttctccatcagttcaaagaaactgcccaaactatattcactgggggcacaggcagatctgacagcatttggtaattttctaactacactgatcagcaaagtaagagtaccccttgaggtaaaacaatgtttattgttcctgtagttccacaactaaaaggtctggagatgtgtttcttctctgagctgtccttcctgaatgaaaacgttgatggctgcagatcagtaggagggctcatgtagtctggattccatcaagcagtgttttctccagagcaaactgaaacgggggagactgcaaatgtggaataaaggagcttccaaaagtcaccaaaaacagcttcaagtgcaattgttggcacagagtagacctgaatttctaataaagagtgcttacttgagcaagggtatcagtcagaagtatcaggactctaagactgaatcaaaatagcactaggatgcctaaacactatatagagacaatatatgtaagtgtgcttaaagctgtggtctctagactgagactcccacagtgtgatattggcttcacactggtgagtgtgtgaccttggacaggctactcaacttctatttgctcatctattcaatggaagtgacacttatttttgaagtggttatgaggactcaatatgccactgcccatccctaatacccattgcccagttgcttgattaggctgtctgccagaattccgagccttctctgtctctccactggcacctgtggggcagcatgtcctctccctctgttgaagtcatcccatggtagccaccctgccactctgatctcctatattttccatggtggaggagcccagggatctctctggcaacccaactttcagatatgataataggagcaagagcaaccacaactttcaaaagtattttttgcccattcgaacaattggatacatgcataagtggtctttttttacacaattaatattgctgtttacattcctttttcatcaagtaatatatctgagagataattccctatcagtacattttaacaaccatgtaatatttatcagtttcacgattttttgatgggtcctcctgctgaacttttttgtttccagcagtttgttatcaccatgctgtatcgccacccttgcgcacacatctttgtgaatgtgtataattatacctgtaggtcaaaactctagaagcggaattcctaggtccagttgtatgtgcgttccaatattcttagatattgtcaaagatatttcaccattttgtatgcccaccaacagtgtataagaatacctctttctctacattttaccaacaacgtacattagtcaattttttgtctttgatattctgatagaaaataatgtcatgctactgctttaatttgcttttattgttttactccacatgggttgaacaccttttcatatgtttataagaaaatatatatatatattcatgtaacatatataatgtgtgatgataatatatatattatggttattaggaagactatattcatttagtcttcctaataaccgagagagagagagagacagagagagagagagagatgataggtagatactattagcctttaatagttagcctcattttatagttatggagcctgaagcttagagggattattaacctaaaccaagttacacatttaataattggtgggacggggcttccaaaccaagtctgacctattttacagatgacgaaactggaatacagagaaagtttaggtaactctccatgatcgtactgccagtaggtggtagaattaactttggaacttgggcctgtacgatcacaaaacccacgtgcttaacctttatcttcatctggccatctcatagttgacatgaaatcaagggaaagctaacctttccttttccttattatataataatattattagaataagcaagtttgttgttgttcccttattactatagtaagggaacaaacttgcttatgctaatgagtgtattaagtttttggaaaatgtatccaaggatagaatacataactcatttccattcatctattcatgtattatgtatttgttgagcaccttctatgtgcctgggcatttagtggtgagccaaatagacatggtatctgccctaataatttagtgggggcagttaatagtaactgtggtaaagacaagctcagggagttaggagaatataaggcaaaggagcttggtggcatctaagaggtcagagaagcttcctatgggtaacttcagggctgggcccaagaagtaaaatttaaccagagggaaggtgaaggaagatgtgtttctgacagaaggaggcatgtgccaagtccttgggacacaagctgaagctgaacaattgtccagagccaacgttgttgtggggttgtggaccatattacagatttttatttttattttttatttttatttttattttatttatttatttatttatttcgagacggagtctcgctgtcgcccaggctggagtgcagtggcgccatctcggctcactgcaagctctgcctccctggttcacgtcattctcctgcctcagcatcctgagtagctgggactacaggcgcccgccaccatgcccagctaatttttttgtatttttagtagagacggggtttcacggtgttagccaggatggtctcgatctcctgacctcgtgatccgcccgcctcagcctcccaaagtgctgggattacaggcgtgagccaccgcacctgggcacagatttttatttttaacttaaaaacaatgactcattgttgacaaacgttacgtagcaagtgacatcagatttatgtttttaaaaaggtcatctctctagtaccaagacttctatctatggagacctggaaaagggaatattcttataaaaagagtcctactgctaatgatgccatagcaccacttcatagcagtttctaagagagggagaaataaagaaaatgtttgacttttttaaagtgacagagtccacctactctaagtagtctttggcataacggttgccctctgaagagccaatttaaaaataataccaacctatcacttaggagaagctttactgtcatcatccacaataaagtatgtttcttccatttgcaggaataatttggaaaactttttgcatagatcccatgataagtttcaaagagcaaatatattcattatgttataaacaagccacagactaccactatttcaggtatttgcaggcactattgtgccttaatataactgtggagtcatttttccaaaatctgaatataaagcctctatttctatccttcatttgattggaaccattcaatcatcctggtagataataagtttgcatgttcttagattgcatttcattatgcttccgttcccctagaaaataaatgtgctccttttcccaacaattgtagaggagaaatacttctgacatctcaaatttcagcctctggaagacgtccctcttctggacatgaaagtcatttgtttcctggacattcatctgttaaataagagaagtcaagaccccctcatgacagccataatacctattaatttaagtttccaaagaaagatgaatccagatcaaaataattccatccagatcaaagtaattccaaaccaaagagagaatactaaaaattcctttcgctttcaggatgactttccttttcacagaagaacctgcagtgaagaagattggtttatcgtattttatttgtcagagctgccaaagtgttttatgttaatataatttttagcttcagagaatgttcattgaaaatgtcttcgatggtcattttggtgtttgtttcttccttttaatctagcttgtaatttattctgggcgttctaagtaccagaatgaaagaagacaattaaggtccttgacttgagggagtccatggaattaatgacgtttataatctagagacagatgacacacaagtgaatattctttttcaaaagaacatgcagaattataaccacaaaatgcttagaaggataatcctcaaacccagataaacccacctattgaaataattttggtccaaatcttctttgcagaattccaaataaattatatggatactccactcaaaggaggaggagtataactccactgatgtatgggctgtacatacagacttccaaagaatatagtatggaaaaagtaatgctttcatagttgagaaacctgacaaacactgcttcagccaggtgatcaaggtcaacatcaacagtcaataaatcatgttaatgcatgtacccttgatatgaggtgaaaatggtgaagatctctgcgatcttcatgccaaaaacttaaaaccccagtctaatcgtgatgaaaacatcaggcaaattccagtgaaggaacagtctatacctgattagtactcctcaaaactgccaaaatcatcaaaacaaggaaagtgtaagaaaatgtcacagcaaagaggagcgtaaagagaatgacaacaattgtagtaaggtatcctggatgggattctggaacagaaaagggaaatcttaaaaaatatgaataaactatgaaactcaattaataaaaatgtgtcaatagtagttcatcagttgcaccaaatgtactatactaatgtaagattaataataatactaacaggaaactgtgtgcagtggtggagtggggactgtataggggaattctgtactatctgctcaattattctacaaatctacaacttttctaaaaaaatctaaaactgttttaaaagaataaaatctattaatttttaaaaaagaatattagtcaaaacaaaattaattagaagaaaaaatgcccacagtcagatgtcactattaataaaatgatacccccttgtaaatgtcacatgaaaaatcaaatatagtcaacttgcaaattagaaaaaatatactcagaaaaaacagaaagtaatatatcccattttaaaagggtaattgtaattttcatctgttctgggcctcttcataccttcttacttccatagtagaattcgaaactttccaaaaatatgcatactttataaaagcagagtacattgatttcttttagtaccaaactcaattgtataacacaacatcataatatgttctatcagctaatcttaaatagagagatcaaccaggctgggtacagtggctcacctgtaatcccaagactttgggaggccaaggcaggagaattgctttaggccaggaattcaagaccagcctgggcaacatagagagaccttcgtctctacaaaagaaacttaaaaattagtgatgcctggtggcacatgcctgtagtcccagctacttgggaggctgaagtaggaggatcatttgagcctaggaatttgaggctgcagtaagctatgattgcaccactgcattccagcctgggggacagagtgagacccccatctctcaaacaaaaagagagagagagagagagagagagagatcaaacatctatagaatggccccagtctctcaagtagctcacaatgaggtaaggcttctttagattctgctaagacttctctaaatgagcagtccttgttttatataacatggaaaacacaataaatacataaacaaataaagaaatgctatccagctacttaaaatcaagcttggtaataatcatatcacctgccatcctatcaccaaaaaaagagatcaaaatagcctggttattaatattttcattgaatattcatctcaaaatcaaaaagaggaaaaagtaacacgtttttaatacgagtgacattttatattaatgcattgtcaatacatggatagctttcataaaaccaaggcccaaattcaaccagaataaaagtaacagtactcatcttccaacctcacgcgtgagttaaactgttacaatgaccaacaaaatatagatttttctttccttttttagtataaaaattgatattattatttttcattaactctatccagtccctttttgcattgttattggactttatggattagaataaatttaaaatttgcattgaatttgtaatagtcaaaaattccaaataaaaagtgttctcactccatcttgccagaaccagaattgttgcatttgcttagtatgcataactgaatgatcgaacaaaagcaatgaccaacaagattcgatttaaaaatagtattaccacaagaccatggtggtaaaagtcctaaacatcttctagtttaaccctttcacaataaccctcacttttcctgagggccaggaaagtgaaaagacactgtaataacacaagtaatttatgacaaagtccaaactagcatccacattatgattcattcattcaaacatggttatattcaacaaatgtttattgggtatcttctgtgtgtcagaagctatgctaagcatacatcagcaaaaacagataaaaccactgcgtcatggagtttatagtctactgggagaggtagattttaatcaatcacataaacaattattttttaaaaaagctataacgcattctatgaaaaaaggtataccctgcaacgagagcttacatagataaatttgacctaatcaaggaaggttctactgaagagtcacatgtcgaggatgaattgggcactcgttaagcaaggagaggagaaagttgttaagcaaagggaacagcaagtgcaaatccctgtggaaataaaatatggaaggcagagggtgtgaaaggaggcctgtgtggctgaagtctctaagtgagaaagagcatttttcaaagttgaggatgaatataagtggagattagataatgcaaaaccttgtaagtcagaataaagagttttgtctttgtcctaaatatcatcagaggttattaaaagattttaagcagaacttggaggtggttggtgaaggacaggcattttgcactatgcaaagattactctagctgcagcagggagaatgaagaagagacctgggaggatggggtcaccccagttaggatattttccaacccagtgctctttctattaccctacatatgcgtcagaatctgcccaccaaaatccattttcccattctccctaaccatgtggttggactccatttcccagatccctttgcagttaggtatggccatgtgatgaagttctacccagtggaatgtgggcagaagtgaaattggctatgttaagggctttgctcaagaccaggcaacacctcctccatgttctctcctctcttcttccgctggctgcatagcagtgaggacaatgagaatttgaaggtaacagtgcacttatcagcctgggttcctgaataaacacgttgacaggagaaactcaccaacctggagcacacatccagactgtctgatgagcaataaatatgaacttccacttcttagagccacttcattcttaggtccattctttacaacaacttagcctgttctaattaactcaatcgatatgtctttctacgtttagcatacataatatgtctcatatgggtcaatgtctataaactggaaaaagcaactagcaaattcattaactagggacctgcttatagttttattatataaggtaattacttcttagtttatataagcccacagtccctcctgaactgacattctatgaaataattcactgagcctcacaagtatgatgaattgcacgcttaggaattttcgaccagggtccacaccttaactactttctcctttaagtgaggctagtaatttttaaaatgtctatgattggcttgggatttctctaataagaaatgtaaaaaacaagacccaaaattattaattttctagtaattttccccttaggccaaggtcatttcttcagctgttatagtctttaattcactaaaaattatttactaaatacctactgcaagaacatggctaagtcccttagcagagccaatattgatgtgttggctgctatggatattaactatatccaattctaaacactagtatgtatttctgaagtattaatctggcttagatagtagacagttccataggttaaaataaaaggcacagtcagatcatacacagagttggaaagagaaacagaactttgtttttccctcctgcaaacatgctcagtcaccagttgttcacttgtgatgggtgcaacctgaatcagttggcatgttcttggctgcaagtaagcaaaatgctaaactcaaaatggctcaaaaaataacaacaaaaaaaaatgtagagacccttcatgacgtcatggaggacccagatcatttatctgtggtgccctcaccagcaccttggcttttgtccccagtattgttcctttatagtcccaaaatggcggcaatatcctcacaaaaagactaaatactcaaaaaaaaatttttttaagaaacatttttttcctcttttatatatcttcttaagaacaagaaaaacttcctaaagcctgccaagataattttctgtgtccctttggccagaattgtgtcgcatggtgaaccctaaaccagatattgataagtgaagtagaattgtcatgatagatttaggtgagttaagatttactaaccaaggctagaggatggccctgaaaaacacagtcagccaatacttgaacaaaattgggattctgttagagagaaaaaaaagaacagctattgggcaggtaattgccatttctactccacaaagcgatctttcctctgtaatattttatatcttggaatgacctaacattcacttcattcttcatttccaaatttagatatagataatagataggtagatagacagacaaatagatagaaattttcttctttttcaaagattatgctactggtgctaattattatctctatgtgtgggtgtggtttaaaaataattgtcatagaaaaagctactgcattctaacatgtctgtgaaaaatagctagaaatttttgaaaccaagtctattcagctcttgggtgctggcctcatattgaattattattgccatttcctttctgctgaaatattgatgacatggtcatcactcattcaaccaagtgtggctatttcagatttagttaagtgtctttattcaaggtgtcctcataggctcctttatttgttagaactatttcaaaatgaatagacagatgaatcaccagagcactgcacagcactaaacggaggaaacaaaacaaacaaaataataagacaattacagatttgggaaattgcttataatatactatcaactgataaaagggtgaaatctatcatttagtatgacttgtgtt

SEQ ID NO: 2557 - DNA, 1245 bp, Homo sapiens
cagcgccgccttccgctgggatctgttcccaggcccagggacgccggccccaccccagttgcctaggtgacgaggggccgcttctctcggccgagattgcggcgatgtcgcaggggacgactccctgggggccgaccccggcgggaaccacgcccgaatcggagaaaactgagaatatttttgaatttcaaaaaccttgaaacttgtttaaaggatgccattctactagattattatgtatctggatttttgtgggctagaggaatggatttctctattattcagtattcaaaatttatgactttactagctatgtcacttcaaaatcttaaaagtaacactacatatgtccttagaggaaagcataaaatggcttggagaagttatggctgaaataggaccaacacattcgcaaaagagtgaggactggaatatctttgatgtaaaacaagccaatgctatcattgattacttaaaaatcagcttatttcaacactacaagctatacgagtttatgttctactctgccagggaagaaattgtgataggaactgagcaagtgatagaggttgtcaagtctgcatgtggccctttcccaaatcctctggaagaaggaatctcatttgatatttattcaacattcatagagccccccacaatattggatacggaaatgaagaggttggatcaagaacaaggccctgaggagtctcagccagaaactgacacctcagacatggatcctttagttggtttcaccattgaagatgtaaaatcagtgctggatcaagtcacagatgacattttaatcggcattcagaccgagataaacgaaaaactgcaaatacaggaagaggcctttaatgcacgaatagaaaaattgaaaaaggcctaaggacttggtacaaggagagtgatgctaaacttcacagaaacaaacaaaaccagccagaataacagactctctggagcgtcgtgtctccatcacttagttgtgaaaggaaaaccaagccccactttttattttcctaagtaattagaaaagtattggtcccaattttgctatctcccatcccataacagcctctgaatttattgcaccaagtgtaatgagaacattttgtatacaagagtttgaaaaattatatataaaaatacaattacttttatgatagtcctttgacgttttgactaataaatcctattcatcttcaaggagaatgaagtcaactttttaaataacca

SEQ ID NO: 2558 - protein, 182 aa, Homo sapiens
MSLEESIKWLGEVMAEIGPTHSQKSEDWNIFDVKQANAIIDYLKISLFQHYKLYEFMFYSAREEIVIGTEQVIEVVKSACGPFPNPLEEGISFDIYSTFIEPPTILDTEMKRLDQEQGPEESQPETDTSDMDPLVGFTIEDVKSVLDQVTDDILIGIQTEINEKLQIQEEAFNARIEKLKKA

SEQ ID NO: 2559 - DNA, 1555 bp, Homo sapiens
ggggacgactccctgggggccgaccccggcgggaaccacgcccgaatcggaggtacaccgcccctttcccttcccggtaccggtgccggtaccagagacctccgagcgctcattcccagtccgcggagtctgcggccaagccaaatccggtctccgaagaggcgccgcacgtctggccccggctggtgagcggcctgggagggcggcagggctgggagctgcgctggggtccccgacaccctctgcagcccggcgccccccagccggccccggcgcgccgtgcacggtgccagcgggtctaaatgtatgaattcttccattggacggctccgtgcccaaacgccctcataaccacgcgcttctaccgcagagagacactgaattccaggagcatgaaaagattctgtctccggattttctttcagttgcccaaatcactgatttgttaatggaggacatcgatggagttcaagaaaaactgagaatatttttgaatttcaaaaaccttgaaacttgtttaaaggatgccattctactagattattatgtatctggatttttgtgggctagaggaatggatttctctattattcagtattcaaaatttatgactttactagctatgtcacttcaaaatcttaaaagtaacactacatatgtccttagaggaaagcataaaatggcttggagaagttatggctgaaataggaccaacacattcgcaaaagagtgaggactggaatatctttgatgtaaaacaagccaatgctatcattgattacttaaaaatcagcttatttcaacactacaagctatacgagtttatgttctactctgccagggaagaaattgtgataggaactgagcaagtgatagaggttgtcaagtctgcatgtggccctttcccaaatcctctggaagaaggaatctcatttgatatttattcaacattcatagagccccccacaatattggatacggaaatgaagaggttggatcaagaacaaggccctgaggagtctcagccagaaactgacacctcagacatggatcctttagttggtttcaccattgaagatgtaaaatcagtgctggatcaagtcacagatgacattttaatcggcattcagaccgagataaacgaaaaactgcaaatacaggaagaggcctttaatgcacgaatagaaaaattgaaaaaggcctaaggacttggtacaaggagagtgatgctaaacttcacagaaacaaacaaaaccagccagaataacagactctctggagcgtcgtgtctccatcacttagttgtgaaaggaaaaccaagccccactttttattttcctaagtaattagaaaagtattggtcccaattttgctatctcccatcccataacagcctctgaatttattgcaccaagtgtaatgagaacattttgtatacaagagtttgaaaaattatatataaaaatacaattacttttatgatagtcctttgacgttttgactaataaatcctattcatcttcaaggagaatgaagtcaactttttaaataacca

SEQ ID NO: 2560 - protein, 182 aa, Homo sapiens; identical to SEQ ID NO: 2558

SEQ ID NO: 2561 - DNA, 1438 bp, Homo sapiens
ccgtagcgggctgctgtcggcctccctcccggcctcctgctcctctgcgcggtccccagccctctacccggcgggcagaggctcgggcccagcgccgccttccgctgggatctgttcccaggcccagggacgccggccccaccccagttgcctaggtgacgaggggccgcttctctcggccgagattgcggcgatgtcgcaggggacgactccctgggggccgaccccggcgggaaccacgcccgaatcggagagagacactgaattccaggagcatgaaaagattctgtctccggattttctttcagttgcccaaatcactgatttgttaatggaggacatcgatggagttcaagaaaaactgagaatatttttgaatttcaaaaaccttgaaacttgtttaaaggatgccattctactagattattatgtatctggatttttgtgggctagaggaatggatttctctattattcagtattcaaaatttatgactttactagctatgtcacttcaaaatcttaaaagtaacactacatatgtccttagaggaaagcataaaatggcttggagaagttatggctgaaataggaccaacacattcgcaaaagagtgaggactggaatatctttgatgtaaaacaagccaatgctatcattgattacttaaaaatcagcttatttcaacactacaagctatacgagtttatgttctactctgccagggaagaaattgtgataggaactgagcaagtgatagaggttgtcaagtctgcatgtggccctttcccaaatcctctggaagaaggaatctcatttgatatttattcaacattcatagagccccccacaatattggatacggaaatgaagaggttggatcaagaacaaggccctgaggagtctcagccagaaactgacacctcagacatggatcctttagttggtttcaccattgaagatgtaaaatcagtgctggatcaagtcacagatgacattttaatcggcattcagaccgagataaacgaaaaactgcaaatacaggaagaggcctttaatgcacgaatagaaaaattgaaaaaggcctaaggacttggtacaaggagagtgatgctaaacttcacagaaacaaacaaaaccagccagaataacagactctctggagcgtcgtgtctccatcacttagttgtgaaaggaaaaccaagccccactttttattttcctaagtaattagaaaagtattggtcccaattttgctatctcccatcccataacagcctctgaatttattgcaccaagtgtaatgagaacattttgtatacaagagtttgaaaaattatatataaaaatacaattacttttatgatagtcctttgacgttttgactaataaatcctattcatcttcaaggagaatgaagtcaactttttaaataacca

SEQ ID NO: 2562 - protein, 182 aa, Homo sapiens; identical to SEQ ID NO: 2558

SEQ ID NO: 2563 - DNA, 1434 bp, Homo sapiens
ccgtagcgggctgctgtcggcctccctcccggcctcctgctcctctgcgcggtccccagccctctacccggcgggcagaggctcgggcccagcgccgccttccgctgggatctgttcccaggcccagggacgccggccccaccccagttgcctaggtgacgaggggccgcttctctcggccgagattgcggcgatgtcgcaggggacgactccctgggggccgaccccggcgggaaccacgcccgaatcggagagagacactgaattccaggagcatgaaaagattctgtctccggattttctttcagttgcccaaatcactgatttgttaatggaggacatcgatggagttcaagaaaaactgagaatatttttgaatttcaaaaaccttgaaacttgtttaaaggatgccattctactagattattatgtatctggatttttgtgggctagaggaatggatttctctattattcagtattcaaaatttatgactttactagctatgtcacttcaaaatcttaaaacactacatatgtccttagaggaaagcataaaatggcttggagaagttatggctgaaataggaccaacacattcgcaaaagagtgaggactggaatatctttgatgtaaaacaagccaatgctatcattgattacttaaaaatcagcttatttcaacactacaagctatacgagtttatgttctactctgccagggaagaaattgtgataggaactgagcaagtgatagaggttgtcaagtctgcatgtggccctttcccaaatcctctggaagaaggaatctcatttgatatttattcaacattcatagagccccccacaatattggatacggaaatgaagaggttggatcaagaacaaggccctgaggagtctcagccagaaactgacacctcagacatggatcctttagttggtttcaccattgaagatgtaaaatcagtgctggatcaagtcacagatgacattttaatcggcattcagaccgagataaacgaaaaactgcaaatacaggaagaggcctttaatgcacgaatagaaaaattgaaaaaggcctaaggacttggtacaaggagagtgatgctaaacttcacagaaacaaacaaaaccagccagaataacagactctctggagcgtcgtgtctccatcacttagttgtgaaaggaaaaccaagccccactttttattttcctaagtaattagaaaagtattggtcccaattttgctatctcccatcccataacagcctctgaatttattgcaccaagtgtaatgagaacattttgtatacaagagtttgaaaaattatatataaaaatacaattacttttatgatagtcctttgacgttttgactaataaatcctattcatcttcaaggagaatgaagtcaactttttaaataacca

SEQ ID NO: 2564 - protein, 292 aa, Homo sapiens
MSQGTTPWGPTPAGTTPESDTEFQEHEKILSPDFLSVAQITDLLMEDIDGVQEKLRIFLNFKNLETCLKDAILLDYYVSGFLWRMDFSIIQYSKFMTLLAMSLQNLKTLHMSLEESIKWLGEVMAEIGPTHSQKSEDWNIFDVKQANAIIDYLKISLFQHYKLYEFMFYSAREEIVIGTEQVIEVVKSACGPFPNPLEEGISFDIYSTFIEPPTILDTEMKRLDQEQGPEESQPETDTSDMDPLVGFTIEDVKSVLDQVTDDILIGIQTEINEKLQIQEEAFNARIEKLKKA

SEQ ID NO: 2565 - DNA, 26939 bp, Mus musculus
  misc_feature (1)...(26939): n = A, C, G or T/U
cccttcctcttcccatgaacatgaacccaaggcctgtctgtgccaggcatgtgctccttggctaaaccatgccctcctcatgtgaagtgggccgtcctcatggtcctcaatacttgggtgtcatgcattaggggacctctaaagaaaagttgctagaataaggtgtgtgtgtgtgtgtgtgtgtaaggatattagaatggcttacaggccatgacctgggtattctcaacagcgacaaagcgactgtctccaagaatactgtagctattcagtgtgccagcagtcccaattcagtgctggagtcctgtaggattcctaggggatgctggtcttgggtctgcactggaatcctgaagaacagggttctgacaccagtgagggcaagcaggcaaaaagcaaaagcattctccttccatgccctcttatgtgggctaccaccggaaggtgtggcccaggtttagggggtcccagcacaagcgtcccctacaggtgtgcccagcaggttgggtgagttgattccagctgtaaagctgggtcagcagacacatcacacaagcctatgctcccacagctgcctcctacattctcatctgtacactggtccttgggtcccctcccaagtattgtccccttgtttcagatcccagtggcatcctagtctcttggtaggataatggtgagaccaccaggacacaccacaacactgttcatgcctgttccatgctgacctctgtccccacaagttacacttcctgaaacacctcaaaagcctctagtgaggaagattttgttcggaaccatggtaacgccttgttatggcaaataatctgtttaccactttggctcgggaacctgccacttctggaagccatgggaggaacagctggaatgaatacaagactgccttgccttatctctgctttagtggcaaacaggcaggagagtgtgggatcacccagacttcaggcttttgggaagcaattgacctgtcttgggcccaagtggctgtgagtccctatgcccgggggtgcatggccaccctctgacagtctccatctccctgatctagacttacagaagtgtagctacatctctatgaagttgggtcctcaggcaacttaccactgaggccctctgccttatgaccttttttaaggttgcactgtgtgtgtttggcctgtagcttgccatgctggcaaggctggtattaactcagctccaggtctgtcagtctccccagtcctaagcattaaacacgtggccaccatacccagctttgctttttttaaagtttatgggatgttttgtctgtatatttatctgtgcaccacgtgtgtgcaggctctgatgtcaaaagagggcatcagatctcccagaaatggagctacaaggggctgggtgctgccatgtgggtgctggaaaccaaacccaacatgaatgaacaggcagtgctcctagccgtacctgagacaggcttttggctgaacctggaggtgaccagagtagttcagcctttggatcccgtgtctgtcatcctatgttgacaggggttacaagtgtgggccaccacacatggtttatgtggtcctcatgctatatgacacacactttacccactgaactgtctcttcagcctgatatccttttgtgtcaaccagaggacatggtctcctgagggcaaagaattttccttgctccacaatcctaagggcatggaacccccaacctagtaataaggcccgcccctgatgtagcaactctgtggtctggttcttggctaaggtcagtggcataactgaacctacatacattgggcctgtggggtccagggctccgcagacacccatatgccagtcgctgaccattcaaaagtgaggctgaagtaacaagggacagaccttctatctaggctccttccggagggatgtgtatctgaggatgtgcccgccttctttctgccagtcaggggtgcagttagtgggttagctgagtagttaaaatgtgcctgttctgggagatcaggcaaagcagggacttaagcagagagggtaaccaatgagagtcagcctgtgcaccaaaggtgtcccattgcaaaaatccaagcaaatggaggttaagagggcacttgccatttgactggagtccctcagcgactcaccgacaacttcaaatgtattcaaaggtgtggcccaactcgagcctttccccttcagggtctgtgctcaagttcctctggtttaaattgatcaaagatagggctgtggctcagtgggacgaacgctcctctagcgtgtccaaggctctggggtccagtcccagcactccctgtctaccccaggcttacactttaggaggtggaggcaggagtctgaggaattcacggccagccctgaatataggagacccccatatcaaaaacacctaagtatgtgtattattaaagttattatcagattagtactacgtggtcaaagtcacacacactctccccaccccatccccggtgttccagtgtgcatggagctactgctgggatccactgcaaccacagaaccaggacagaagcggatcagtaacgtctttctctcctccccggaagtagatgtcaatgtcttcggcgccacccccggaaaaggtggagcgatcgccttcacgcatgcgctatacgtctgcacatgcgtagtgctccagggcagcggaacggggtgaccctgagtattgagaccctgcagcgatgctgagcaggtttctaggcccgcgctaccgggaactggccagaaactggtgaggaggtcacccgccattccaccgtgtgctctggggactggggaaacctgaggctgtaacaggcagagtattgcgggacacagtgcaggtggaagctccgaggttaagctgcaatcgccttcgttcggtgtctgaggtgctccaagcctgggtttccccagcttgacctgggtagccttgtgtgcggctctgggtgggtaccctggactcctacggctcggaactccgacgtgcagcctggcgacttgcagcctttggctttgattttgcagtctttcgtgtacttcgttttttcgtttaaacagtgtttttgtaaccccaagttggtctggaactcccaccaatcatcctgcctcacacttcttgaacgctagaatagcgggcacccaccctcacctgaatgttttctttgcatgcgtgtctgtgtaccgtatacgtgcccagtatccaggtaggcgagaagaggccatcggctcccctggtactagagctagaaatggttatgaagcatgtgggtgctggaaattgaacctgggatctctgggaaaagggccatcttctccagtttaatttttattaatagtttatttccaattatatgtatatgtgtgggtttgtgtgcgtgtagtacatagaaccggtactacacgcacaggtgccggaagtctccagaagatggtgctcagggtccatccacagcgccacacaggggttgtcacagcactgggggtagaggggtggggtggtggcaggcaagagccaggagtttatggccatcctctgatacatagtgaattccaggtcggggtagggtacattgaaccctgtctccatgaatgatgaatgaatgagtatagctataccatgactgacccttctgggtaggctgtatggtattagtggccgcagcggagggtggcatggatcagacagaagacacctgctgggaggccagggagagggctcacctgtgggagattccgtttgtgtgtgaggcttggaggtgacactctgggtgtcttagcaggggacagaggaggtaaggttctggcactgttgctcagtggctggtatcttggtgctctgtgtagttcagattcatgggctgtctacaaactgtccacatggtcccactgggcataaccaaacagagcagtatccacatggtcccactgggcataaccaaacagagcagcggatgaactttgcccccagtagcctggtcctgctgcccagggaagggtcttctgatgaatcagccccaactcccactcacctgagacaagaatctcactgacatccagtcctcggaagccaagtgccagctgtcacggtcacatatgcgatgtaacaggagtttacaagtttaccacagtatgttgcccatcgtgatagtgcatgcctgtaatccaaaggcttgggaggctgaggcaggaggatcacaggttctaggtgtgcttaagttgcatattgagtcttgtctcaaaaaactctaggcaaaaagtaataatggctgtgctgagagtcaaggactcaggcacagctcggccaagctcagccaggctcagttcccaacccgtgcctcgagcactctcctagttttactttcatgtaggtctcatggaaccggggcaggcttctaactctctctgtgaccagagatagccttgaactcatgaacgcacctggttcatgtgcttgggatggaagccagggcttcctgtgtgtcaggcaagctctctatccactgagcaacagccacagcctcccctccaccctggtttttatgtcatgtatgtgtgtgtgttgtattttatatgtcatgtctgtgtgtttgttggcaccagtgccagccacagtatgtgcatggaagtcagacagcagcttgaaagtgtgggttccctacgacctgggttccagtgaccatgacaggcttggtagcagggggccttttccctctgagctggcctcaaactccgagagagtgctggggttagggttatagtgtgagcactgtgcctggtgaccacgtttttatttttcaagtaggatctcagtctgtagcttgggctggttttgtctgtagttgttgttttgagacaagtttctctgtgtagtcctagctgtcttgaactcagacatcctcctcctgcctctgcctctcaagtgctggggttaaaggtgagtgctagcctgcctggcctgtgaatctggttttgaactcaaagcagccctcctgtctcagcctcccaagtctggtggtgggggttatgcaggacctcctgccctgcaaagtcgagggaatattgtgggcccttgactgacatcagcatgggatatgatgggagaaggttctcaaaggctaagttaccagcagagtctaacagcctcactctttcctaccaggattcccacagccggcatgtggggcactgtgggtgccgtgggactggtgtgggccacggactggcggctgatcctggactgggtgccttacatcaacggcaagtttaagaaggacgattaggcagcccctcccccaccacaggcctcgatggtgagtctgagtgttggcctgacttctatggattgggagttctggggtggcctggaccttaagcaggaattccttttgtcccttgccatcatctcttttgttccttgtatctcttggaatacattgcatgctgagggcatgcaacactgtgtccccatcaaaccacaccaaactggctattttgctaatgttggtagcttgttgcccagagtacagtcctatttagaccacctgacttgtgtatatgtgtgtatgtgcaagtatgtatgtgcacatgcacacatagggaggccagagactgagatgggagctttcctctgtctctactatctatcacctttaatcagagtctctcactgaaccagaaatgtgccactttggcttggtcctggctagccagcaccttcccagggtcagcctgtctcttgcggccttgtccctaaagtgctgggactataagtatatatagccatgcttagctttgatgtactactggagatttgaactcagttcctggtcctttcacagcaggctcttactggccatctctctagcttgtccactttgtgttttaaggttcatgtttgtgtgtgtgtttgggggctgtacctgcagtgctcacagaggccacaagggggcatctgacctgaagtctggtggttatgagctgctgtgtgtggttgctgggaactggacccaggtcacctctccagatccatccatacaggtctcttgttgaactggagctcctggattaggtagactggccagtgagcctcctgactttttgcatgtctgctggggggtggatggaactcatttcctacctacttattgctcctccaaccctctcactccatcttatagacaagggccttgtagtgtgacactgctggcatcactcccagagctcagaggccctgggctgcccgagctggttcagtgtgcttagcttactcaccctttgtcccctcccccaggtaccatgtgccgaggcctcagacacagcgtagtcctgtggaagacactgaggaagctggacactggagaggtctgcaccgctcagggagcttccatgttgacagacactagggctgccttgatgggtgcagcattaaaccttattcttatgccttggacgcctggctccttcctcatcatcttcctcaaggctttccgtgctcaagggaaattcgtctcagcccccagcacttgcacgtctgggagagtctttaacaagcagaaacccttacactacattcaagtgttttctgggtggaaactgcacattgttttctctcagctggtctgataaatcactcccagctttaatgcttttaaagtagtattcacggcccctattggccaccatacccagctagagcagggctccttccttcctggttttgtttgtttctaagacaagttcttatatagcccaggctggcctcacactcactatatagctaagtctgaccttagacttctcaacctcctgcccctgtctctcaagtgctcatgcagctgtccactgccatgcctggtgttcatggagccgaggatggcccctgggccttcttgcatgctaagtaagagctgtgccagatcagccacagccttttggtaaaactgctgtcaccaacccagcacatacatctcggtgcttcataacccagtatggtcagatttccagacagtgtgcactaagtgatttcttgtcttaagaaatcctgcgaagccgggcggtggtggctcacgcctttaatcccagtacttgggaggcagaggcaggtggatttctgagtttaaggccagcctggtctacagagttaagttccaggatagccagggctacacagagaaaccctgtcttgaaaaaaccaaaaaaaaaaaaaaaaaaaaaatcctgcatacgtctcttcccagcactctgggtgtcaagtcaaaacaaccaagagttccatccaggtcaccagcctaggctactgaagacctggtgtcaagacaaattaacaccacagaagaggctagagatatctcatatttcaggggttgtgaactcttgttctttcaatgacccaggttcgattcctgacacctagtgtctccagtcagtcccatatcctcttgaggccttcatgggcatcaggcacacatgatgaacagacaagacgtgtaagctaaatactcataagcataactctttccctaggcctggggtgcaagcctgacattccagctcctcaagatgctgaatgggagaaggtgaagtgagggctgctggagccacttagtgagtggagcctgtgacttgagggtggacaaccctgtcttcatgcttggaaggctgaggcagggtcaggagtggggtagcctggggcacacacagctgagtacaactcttgtgatctatctgattagggtttccactgctgtgaagagacaccatgaccaaggcaactcttataaggacaacatttaattggagctggcttacaggttcagaggttcagtccattatcatcaaggtcgaatgacagcatccaggcagttgtggtgcccgagaaggagctaagagttctacatcttgatcagaagtcagcttggagaagactgatttccaggcagctaggtggagggtctctcaaagcccacccctccagtgacactctccaacaaggccacacttcctaatagtgccactccttgggccaaccatattcaaaccaccacaccatcatacctgagcgcaagctctgacctattcacacagtaagataaactcaggaaagttgtcaagatcagaaacggctagggatggagctcctttagggtgtacaaggctcttggtccatctccagcacttcataactgtcaccccagctacatagcaaggttcaggacatcctgggccacttaaaaccccttattggtttaagaataaaaaagatggaaggagaaagacagttgagtaaccagcttggcaaacacgcgtgagagcctgaacttccttgcccggaggctgcatgtctgagacctcccttcctgccagcccagataaagcagtaagctacaagctgagagacccagtctggggaagttagatggttctggatggtaagaggcacagatttttaaaattcaaaaatagagaattgagaaccccagtgtcaattttctgctgccattctcacatgcaaaaatctgtcagacaccaagcctggcttaatcccagcacctgggaagcagggggcagaaggatctcggagttcaaggccagggaaagctacaaagtcagactctgactcaaaaatacaaaacactaatcccagcctccatgtccccctgaccttcttcactgtgatctgatctctcctcctgatctggggacccaaatcctagctcataaaatacagttcctgagctccaaaaattgcaggcaagacaaagatctttaaatgtgttgtgatttcacctcatgatcccttggcagctctccttgtcagggagggtcccctttcaaagagaggtcttccaggtactgtataatggaagcctgggtgagaaggtagttggccttcaggcatgttccctgggtaagtctggctgggcctgagtggcaaagcagccgacagtaccaagcaggagtaagtgaccccccagctccctgtcctcagggctgcggtagacaaggggcgatagtgcgagtgactccattcactaacttagaaaccagtttttggttttgttcttccttctgatgctggatctagtaaactccaagctggtcttgaagtgcttgatcctccttcctccactatcccagtgctgagatggcaagcacgtgccactattcctggcctgattttagggtattgctgtgtggcccaggctggccaggaatgttctaaataggttcgtgagccatcaaactcaggctggggtgcagcctaacggcagaaagtctaccacgtgtaaggttctgctttctattttcagtactgctgcaaagaacaaacttcttaaatagttcttggtgaagccgggagtggtggtgcatttctgtcctcgcagtaacgcaatagaggctggggctggaacagccgagaggccagaacgaaacgcagagggaagcaggactgcgtcgaaggccccgagttgtactcgatctttttcacaaagcccaggcgggtccctgacaaacgcacactgcgcaggtgcagcccagcgcgaccccaggaccaggacggcagctcgggcgaaactgctccagcttggtacagaccaggtgcagcacacactgtgcttccggagtctagagcgcaaacgcaatggttgtcccaccccggccacgctgattggctgtccttgtctcagagcagatttatatgagaagttaagcacagaacgaggttctgagcgctgattggtctccatgccctgtgggcgtctcccgcaaggcgggacgtagccaactgtgcattttaagccgaggagctgaagtgatctgattggcttcacagccttggggcgggtcttgaaggcaagcgaaggctgggtcggggccgcggctgcgcagagagtctggacggcagtcagactggtcctgcgagcgcgaaggggcggggccgactccacgcctgcgcagacgagccccacgcgcgggcgggtgggcggagcggcccccctagcgggggctgtgaagcgcggggagggggccgagcgggtggcgaagccggcgcgcgcccggctgggggcggagggcggaggcccgtgggacagaacagctgcggcgagtggcggcggcggagggagccgaatcggcgacgagcccgggggtcgcaacttgcagaagcggcggcggcggcggcatcggccacggcgggcggaaaagccggggcgcaatggagcggaagaggtgggagtgcccggcgctcccgcagggctgggaaagggaagaagtgcccaggaggtcggggctgtcggccggccacagggatgtcttttactataggtgaatgagcgcgccggccgcgcagggccccaacgggcgcctcccagcggcctctgcggcggcctgggcgccccgactgcgggccgcggtctgggccgggcgacgtgcgtccgagcgtgcgtccgagcgtgcgtcctacgtgccagctgtggtcagtgcgcacgcgccggccatggctcgcctcagcgcgcatgcgttgaacccagtgccttgccttttgctgatccgcgccacccagcgctgctgtgagtgcgcgtgcgccacgcctgcagccaaggcttcagcctcgtggcttttagcccgcctgtggcgcgggcttttgtcctccaaggaatcggggaccgtgcgcgccgtgcgaggggcgcccgggccttggccagacgccgctgggaagcgggggtgggagggggatgggctgaccctttgaccctcgcggggactttatcatggtttcgggaagcaagggaactgccccaggtggcctgatcccctcacctgcataaatttgggtttggcttcttgttcagcaaaatgtcccccatttttatggcgtttccaaagcccttgctcttcttgagcggtggccccaaatgtaacatcacagtggcttctgactaatgtgaatgtggtttttgtgtgcaagacttttttatgaataagtctgctctttaaaaaatattttaaattttttatttatttaatgcatgagtgctctgcctgcttgaagagagagcatcagatcacccaatagaaggttgtgagccaccatgtggttgctagcaattgaactcatgacctcttagccaactctccagccttttttttttttttttttttttttttttgaggcagcgtctacatagaccatatttgcaaccttttaatcagggcagtgaaagctgtctatctgaataatagccaggcaacctacacctgctgttcttccccagttctatccccagtggtgtgaatagaatcctgggccgcatgcatgctgccctacggctggagcatctacctttttagccgactgtagttgtccctactccactgcacccggaattgggtggtgcattgtgagttgaactgcctggccctttggtcttaaggagtcgtgggttttggcagtaaggttggaagccagggctaacttgggttcctttcagactgcaaagagggatggggttgttgcttctaataggtctgcagtaggtagggtttttcccagtagggctacatgcaaatggtgccctgtgtgcatgggacttcctccccttctcccttacttgcaatggggccaacacctctgagagatgatccaaagacaccttgtccccaagctgtacctgtcccacttgtctcatcccccacagctgctagctcacatccatgccccagaatagccaccagtgctttccaacgcatttgtatagacagtctcttcttcacggactcctcccacataccttggaaacacttagggctggagagttaggatgtcagccctgggtgtactatgggcctatcgctggatgagggcagctcaaactgtcccactcagcaagctgttgggcacactccatgtgcacacagacctacagagccgagctccttaggccctgcacagaagtgctgtccccaccccagcagccaacagccttgtgactcgggttggttttacctttttattggtcttgctgtgtagcccaggctggcctggaacttgtggctcctccttcctctgcttttgctgcaagaggggcatatgccattgttcctgtttaatagggttttgttagggtgatcaacctgcatgccagagtcacttgttaggaggtggaggggttttaccatgttctaactggtggaggccctgtcagattggattttagaatatttatcttttaaaaggaggcccaggggctctggctggggcttagtgagtagaacatgtgcctagcgctcagcccagtcccagccacatgaaccaggtttccctgtgcctgtcaccagtgcattgagacggtggggacgggatgaccaggaattcagtcatcctcagctacagcaacctggttaacaagagacggttgggggagggcggtcctttgccttcactgccccatgctctccccactccctgagcagcttccagtcccagtcaagtgtccagtaggggtccatgccgaagcttgggacagcatgtgggctgcggtgcctcgtcctagtgccccatctcagctgttgaggagatcagggagcagccttctgggccgcagaccagcaacaccccaagccttgcccagctattttttgtttgtttggtttggtttggttttttgagcagggtttctctgtgtagccctggctatcctggaactcactctgtagaccaggctggcctcgaactcagaaatcggcctgcctctgcctcctgagtgctgggattaaacaactgcccagctggctagctgttttctatgtggttctcacattagggaatctgaggcacctgggacatgcactgcccatgctttctccccatctctgagcagctgccagtcccagtcatggattcaggcggggtaccatcccagaggttccaactctaaccactaatgccagaacatttcacctcagccccctcaaatctacttcatgttctggggcattccctatccatgcagccccacacataccgtggccttttacaccccgctgaatttctcttgagtatcttcaaggcctttgagttttaatatatcagagcctttttcttcctggttgagtaatactccatgacagggcagaactccttactggccatctgggaccacacaggctgcccccctttttgggtctgaatgttcagcatagggtggtgtgatccagttttcagatggcctagaatgtggctggagctgcttgaggggttatcagacctatgcaacctcccatgcatacactcctgagactcaccatagcctataagtagaacgtgtttgtactcacatgccttcccacacttgggaggttatggtaacattgactatgacaagttgaagactggcctgaagtacatgaaccacggtctcactcagttgataagtgctgtcaggcagctgtgaagctttgagtcctacctctagtaacacttggtggtggccatgcaggagcttgaaggaagatgggcaattcttggctagtgagttttgagaccagtctgggataacatgagatgtatcctccaaactaaatagatgcagccctatagcccaatagataagtgatccctggaaagcaagaactggtttctagcctaggtacccgagaggtacaggcccccatacctcatagggcctccttaggcttcccagatgaactgtagccacctagctcaaggcttgactgctagggctgctcttcccacgtgccttcctaatgacctggtgaaaacaggcatggagaacagtggtggtgggtaggagatgggtcctgctcgggctgaccagcctcccgtccgcagccccagcgggaagaagttccgcagcaagccacaactggcacgttacctgggcggatccatggacctcagcaccttcgacttccgcaccggaaagatgttgatgaacaagatgaataagagtcgccagcgtgtgcgctatgattcttccaaccaggtcaaggtgagggtgatgacgtcagggtaggggtgggccctctgggttagcgtctatcgccatcgagtcagtacctctgctggcggaagcatggcgcgcatttggtttggtgggtgggagatctccgtgcctgatcgcccacccgccaccattcaggctctggctaagcacctccctggcccctccaaccctccatggaccccggtcggagcggcccgctgcagagtcttctccccccagggcaagcctgacctgaacaccgcgctgcctgtacggcagactgcatccatcttcaagcaaccggtgaccaagatcaccaaccaccccagcaacaaggtcaagagcgacccgcagaaggcagtggaccagccgaggcaggtgagcccccgggcagtttccaggtgtcaaagaggcctcatcttcatactaaatctcgcgctttaagggtggaagaaaccattgccttgcacaacataggccagtgttgccccggtgctacatccctacaaagattaaaatatgtatcttttcttgtgaagaatttactcttagaaaatagagggccctgcacttacctctgaggaaggagagtcatgaattgcagattttaaccttggtttttttttgttttgttttttaaatcaacaaagcactgcttcttctgtgtttttctgacctatttgtaaacatcctctggaccctgggggctgttgctaggtgggaggggtcacagggcagggccccaacaccttcgcttcctgtaaccttgcacttctgcgctacagcttttctgggagaagaagctaagtggattgagtgcctttgacattgcagaagaactggtcaggaccatggacttgcccaagggcctgcagggtgagcaggggtgcgtggcggctgcctctggatttagtaaagtgggtggatgccctgactggggcctctcttttttaaaaagtgtgcttatgtgtgtgtgtgtgtgcgtgcgcgcatatgtgtgcttgtgtgtgtgctcaaatcactgcagtgcaccagtgtgagtttatttttaccctgtgcgtacaggtgccagtggaggccaggggtaacaggtaccctgcaagtagacttacagggagttgtgagccctctggcctggttctgggaagcacttccaggtcctgtagtaggatgtatggcactagtgaccattctcatgctagttgtctccacagttacaagcttgtgccaccatgccaggcataggtgggtctctggattggctccttatcttctggctgacgaagacttgcctgggatggggtcataacttccaggtagagccctaggcccaagggttcctctgaccctgcccactctcatattccacaggagtgggccctggctgtacagatgagacgctgctgtcagccattgcgagtgctctacacaccagcaccctgcccattacaggccagctctctgcagccgtggagaagaaccctggtgtgtggctgaacactgcacagccactgtgcaaagccttcatggtgacagatgacgacatcaggtaactggcagctctgcccccaccccaatatctccacagttagcacaagaatgtagggcatgccagcaactacccggcccctcaggagtggtctgtgagtgaaggcaatttagatgcccgacaggcacgcttagaaatgctgggttggggaaatagcagtgagaaagcatggcttccacaggcctgggggagctgcacacagagcagaagatgggtggggccaaactgagtgagtgacagccctcaggagtgtggggggggggggatggtggaccaggaagaaggcagcttaaactacctctgagctgcagtctggaccctcggggctagcctgaatttcccttgtcagacttggtgatcaggccagatggggacagggcaggacccagaattaggttctagatgcacagtcgaggctctccttgctatgtgagcatggcccgtagctggtcttactctgccttcccatagcttgcatgtaaaaaagtcagaatgtaaggagaccatggtcacccaaggtgacagagaagctgtgtggagtttctgaaaggggctgtggtgatgcgcttgtggactggtccctgtgtgccctgtcagagtgtgttctcctaggaagcaggaggagctggtacagcaggtacggaagcgcctggaggaggcactgatggccgacatgctagctcatgtggaggagcttgcccgagacggggaggcaccactggacaaggcctgtgcagaggaggaagaggaggaggaagaggaggaggaagagccggagccagagcgagtgtagcacaggtgctgcaggccagggtgggatgtcagcccatcccctagccgggctgctaacagcttcccttcctgcctattgcaggtgccctgcccaagtctgggctgcagactgccttcagccttgcctggaccaggtaggggccagacctgtaggaggcagccgtccacctcctttccaaagcctcctgcttccaggtctcagtgcagggagcccctgtggaccttgaactcacttgtccctgcgctgcctggcaggaagccccacactgaaagcagatgagcagtgacccaactgagaggccacctggacacagtcacctccctgcctccttatcataggacaaggccttgcttggcaccgaggagctgggagccgtgttgggtgctggaggaagtttctggaaacacacctggctatgcccaccttatgtccctaaggctattacaggccagggtctggactgctccggcccacagggctgcccagcctccccacactgagggtcagcagcccaccaggaagtcactttccttcaataaactgatggtaggaacttgtgaactctgacttgtcactgtgtgccacacctctgagggtgtctgctgcccgggcccatggaaacctgctttgggccttagtgtccctgtgtggcagggacacaggctccaactttgagagagcagttggcagcctctctgtgcttggtgcctagatcttggacacctgaactgtgcccctgcagtcggagcctccaagaaactgacgggtgagctggggtgtgtagcccagtgagcgagtcagtctgtggatacaccccagtgactgagctcggccaccctaaatcagatcagggtcttgttccccagcctagacagcactcagggctggagtggtgccttttgtcctcatcccaaaaggaccacccagctaccctgtcacatggacttatatggggcagcctcctgcagtgaaggttctgggttctcattagaggccaaccattgtaacctgagccacccactccagaggacccagagtttgtacatttctctaacataggtagggactgagagccctagcatctgtgggctggaagataaaagttgtcatacaggaggctccttctgttataggccaccaacctgtgacaggcacacaggtctaagatgcgaccaccatagaaggagcccccatccctgttctctgtccctgttccactgagggtggccttcagatagggccttccacaagccctatccaacgtaagcagcccatggtcaggctcttaggtcagggggcccctgcaatgggtactgggcaggctgggagtccccaggttccacgagggcagtgatggctccctgctgctgggcctcatactctaatctgcaacatgccaattgaggacacctgagtctgatgacaatgtagggcaaggccacctagctttccctggtgacagtgatgttcctctgcacctccaaccctttcatctttttaaaatctcctgtcacatgtgtcatccaggtcacccagcaaccccacagcccgcctgctgtcctgcagccaccacaaacttgctcagcccaataccccacccccggggccatgtttctgtccagccagtgtgacaaaggatggtggcaccagaggtaaagcttacctgcatggggtcatccatttgccagaatgttgctaggccatgagtaggaaaacaaggttgtaatgtaccaaagccaagccagtatgccacagacaagctcacagtgggactctgtaacagtaaactccagacctggagaaagcaggaaacaaccatgaggacaggcatcaggaggatagggcctcctttgggatgatgggaaattctggaactatatggaggaggctcatgattttagcgctggggatggaacccagaccactgtgctgcccaccaagactcgaccctggacatggactccaacatggattcacttccaaatgaatcaaagggctgcacatttagctttattgtcattaagggaagcttgtaccaaggctcagcaaagtgacccaggctaccttcccttccataaaggggctgcaaactgcctcctcatctctctgtagctgttcacatctttaattccacagcgttggagtaaaggtctgagggcagggtccagggcgtcaggtgccgctggcaggcttggaagcaagtgcctgtccgtgctttcaggaacttgaggtgtgcaccctgtgtgagcagcacatacaaaagccgcaagggctcagaaccctaggactggggttacagacagttgtgagccaccatgtgggtgttgggaagtgaacccgagtctttgggagagcggccagaactgtaagcattgaatcacgtcttcctcgtatttatttcttagtttgtttagagattaggatgaacataggctcggctgcactccactgctgagactcaccacagccctccaagtgttgagtttatcttaggttactttgctttattggtttatgttgttcatggtgtctgtgtgtgttcatgcatgcctgtcgtagtccaccacagctgatgtcacccctcaggtcccttccagcaggtcactggcagggtcagggcctaccatatcaggattttacatgcctacgtcttggggatgtgactcaggcccatcacagtggcagggcaagtacttcacccagtgttggttcctggggtcagttccacacccgaaaggctcctccagggaaatgccccagcagcctcacctgaaaccctccctgcactgtctctagaactgggctctctgcatgctgggtaagagaaatgcccttatgctgttgatgtttatagataagatctttctctctagaccaggctagcctcaaactcaaggagacccacctgcctctgcctcctgtgtgctgggattgaaggcgtgagacaccatactcagtttaccccttggtcagaggcaagtggatctcttgagttcgaacagcctggtctacagagtgagttccaggacagccagggctacacacagggaaaaaaaaatgtgtacacctgagtttctgtctgtgcaccacatgcatacaggagccctaaaggtccaaagagggcagtgggtctcctgggaatggacttacaagcagtcgtaagctgtcatgtcggtgttgggaactgaacccaggtccctacaaaagcagtgagttctctctctgcccccacagacttagtttgagacagagtctcttgctgaacctggaactcaggaattaggctaggaccactgacctcgatgcacagggtctcctgtcttcacctcccaggtgttgggatcgcaaacactcggctataatttaaatttggagcctcaccattttgaggctgtctctttccgaatcttggaaggctacttgaggtgcctctggtgctcagcttcacaccccctcctctctcccctccctcctggtccacagcttcacatctgagtgtctctgccctccatctctgctcacagccagtagttcaaactctggctgggtgggcagaagtgacccgcttgactgcgtgcagcccaggttagcctctggctttgaatacctgccaaggctgctgaagtttctgccaagtcaaggacaaggactgtagctggggcccagggaatggctagacatagatgttaggaagaggagtcagtacttccttttttttttttttccttttctccccgccctcctgaagcaaggtttctcttcatagtcttgtctgtactggaattccctgtgtagacaaggctagccccaaactcacagagaaactgcctgtctgcctcccaagtcctgtgccactagcatccagctttgatttaacaataatctaagtataataataatagtaattattattaaactggctcttaattcacagccctggctgacctggaacttcctgagtaaactaggatggcttgggacttagaggtgtgagccatggtaccctactggctcttgaccttttattagggtcaaggtggcttctgggcagaagaactaacacactgggggtgtgaggacactctgtgttccaacctgcacttgtgttcatgatggttgtaaaagtgacaggaaggcatggattgggggaggggcactgttgtggctaagaacgctgcagaatggagcggcctctgccccagaccctgggacacaactgacctgaggttgcagtcagctgtaggcaaggacccagacaaggtccatcctgttccctgttcatgagaaatctcaacaggaactctgaggtatatgcaacagctggggacagtatggccctggaggtaggcagagcctgtggaagaggctgccttcctcagagcccagcatctccagtgagggtcgtctcaaatgattatgggcagtgtctgctgggaagcgattcaccccacaagttctaagtgcttatgtctaagtttgggtgtacacaaccccctccacccccaaggatgagctgttgggaaaggcttgacttggggaaagggacctctggctgcccagacaccatgccaggaaggacgtgactcggggaatgggtccccaagtcattaaatgtgcttgggatagaggcgccgtcgtcaggaggaggacagaaccagctggaagaacacagcacaggagctggcgccaccctgttactcagagtgggttccatgactgagggtgaggtgggggaccagagtcagtgtggtaccctaaactagagagtccccaggtgcacataggtagaaatccccggcttctggagggcaaggacagcctggggcaagccaggtactagagaatattgcctttacgatgtagtcacagtgtaggggctgatgtgaaagaaaacaccgtgtggctgcgaggtgatccctgccagagggtccccaaggtctccaggcacacggggaggatttccctgctctcgaagagcgaggactgactagagaagaaagacacaggagggggactccacacttttgagcacagagatgattttgtgggatcggggaaggggaaacacagtgtggccgccaagtgatccctgatagaggtcccgaaggtcccctggcgggcactgggaggaggccggggaagccaggggtgatggcgagggctcctggagcacacgaccctccccatatccccgggacgcaccaaggtggctcagaactgcgggctccgccgacccacctgtggcgcctcccgcacgtgcgggcgggccagggggagggggagagggaggaggaaggggagggtccgcaccctgggcgggggcggggcaaacacgtgactgccggcccggcccgcgcgtgcgcagcggcgttgcccattgttggccgcggtgacgtcgcggggcggggccggggcggggcggcgggagggcggagggagggaagggaaagaagcgtacacgatagcaaaacagaacagnnnnnnnnnnnnnnnnnnnnnnnnnnnnnnnnnnnnnnnnnnnnnnnnnnnnnnnnnnnnnnnnnnnnnnnnnnnnnnnnnnnnnnnnnnnnnnnnnnnnnnnnnnnnnnnnnnnnnnnnnnnnnnnnnnnnnnnnnnnnnnnnnnnnnnnnnnnnnnnnnnnnnnnnnnnnnnnnnnnnnnnnnnnnnnnnnnnnnnnnnnnnnnnnnnnnnnnnnnnnnnnnnnnnnnnnnnnnnnnnnnnnnnnnnnnnnnnnnnnnnnnnnagggcggcgcgggcggcggcggcggcgcgggcccgagcgctaaagccatgccgggctccaccgggcagcccgacgcgggcggcgcgggaaccgggaccaccgccggcgaccccgggcatccgcaccctgcactcgcgggagccgaggatgccgcgccccggccgccacccgagcccgacgacgcggccgctgcgctgcgcctggcgctggaccagctgtccgcgctcgggctggggggcgcgcgccccggagatgaagggatggcgacacgcagcgcggacggggcgacagaatgcggagaggatgagcccgcgccccccgacgagctcgaggtggccgtggcgcccccggtgactggtgcgccctcgatgggcgtgggaccctcgatggccctggcaccctcggtgacttgtgcaccctcgatggccctggcaccctcggtgaccagtgcaccctcgatggccctggcaccctcggtgacttgtgcaccctgcatggctgtggcaccctcggtgacggtggcaccctcaatggcactgacaccctcggtgaccctggcacccacgatggccgtggcttcttcggtggcccccggcgggctgcctcttttggaccccgacgtgagcccccggccatcacccccagacgtgttcgccagcttcgcgccacacccggctgccctgggtccctcgacgctgctggctgagcagttgaacgtgatcgggagtcgcaagaaaagcgtgaacatgaccgagtgtgtgccggtgcccagctcggagcatgtcgcggagatcgtgggtcgtcagggtgagtggctgccgtcgaggagtgcaggggcgcgcttattctcctggataaatattgaggggggcacgtatgtattggtgggaggaagggacaagctgtggcccgttctagcccagggtgaatgtgaccaggagaccccagggacacgccccgtgtggaatctaggcctcggtggatttcttggcgcctttgttcaaagctgccggctgctgcagaagttgggcactgcccaagctgtggccacaaccgcggcctttgtctgggttcctagggacaaccacagtccatgtgccatagctgggggacaccttaggacataggccccttagaagcagctagggctgccccccacccacccacagataggcatggggcggggccagcttagacttgctagcccagggagggtgcccggagggcaggattgaagtatagtagtttagatagaaggtgcctctcttagctctctagcttggaggtccggactaggtgctgtcctctgagaaaatgactatagcccccagcgaaccctgagcttgagaatctggcatttataggagggtctcctggctgtagaagctctccatggggttcaccccgcccatcttgacaggctgacccccagcggtcccagggtatagggatctaatctacccagacatgggggtccctgcggcagcactgtggagctggggagtgtctctgttggccgccccattgttctctttgttcgaaagccaggctgagattcgcacagtgacatcaggccagccgttgctcattggcccttgagctgctggggcgggcaggactgtggtgggcagtgcccggcccttcacacacccacaagcctggatagtgatgacccccaactttccccttccctcctcaccacagcagcccactcctcatatcccagctaagatcggggatcagcctaagaactttagggtggggctcaggcatccctggaccctcaggaatggaggaggatgtgagtggtttgaattgcaaaggtgactgccatcctccaacaagcaaaggccacccgtggccacttcccgagttccaggagtatcccctgctcttctgtcatttatccgttccatgcctaccgagaatgggcggtgctgggcctaggggccctcgagggtggggacagtcatctgtgagccagctgtccctttgtgtaggctcaatgccaccttgggctggcttcccgcccaatgccatcccctgtaactgtactgggaccagttttccagacctgttcagagtctgtgtggccaaatgaagaagtcaaggattatcatcttttgtctcaaagtcacctgctgcctgctgcctctttctggaggcggagcccaccacagttccatgtaaatgtatagcttagcactctttggagaatcaagtccaggggcgtcgggctcagtcccagtctgctgtgttactgagatgtggggtgccattggtggccaacagcaagcttggccttgagtcccccactgtgctggggtgacccctggacactgagcagatgttcataagccctggattggtgtggtccgcaagtctcagctcagtaaatggactcagagccacatggagggcaccctggatatagggacagggcgtcagcctcagggcccttgcctctgacatctgtggttccagcttatcccacccaagcgcatctagcctagttggccatttgttgccgtgataaaacagcaaaagcagctcgggaggatgaggtttattttaatctcccagctacagccgttgactgaggctgcgctgatgcagaggctgttgggggtgctacctactgctcctcatggtctcttccacctgcctgctttctttgagaacccagggccaccttgcccagggatggcaccacccaccaatcatgaatcactaaaatgccccatagtcatgcccacaggccagcctaatggacacagatgggagtccctcttccccagtgtacctaggtttgtgtcgagttgacacacctctgtcaggtcctttgacctcttcccttgactgtgtgtgcctgggttcgttcccccattttttccagggtgtttccctgagctcatggttacccatcaaaagccaggtcacgtccatggacacatggaccctacctggcttccatacctgacctgagccgcagggagccaaggcctgcctatcccctggtaccatcctgttgtgtgagcctcagtcttcttcagatgtacaatagactggagggtattttgagccatgccactgcccttcactggggggaccacacctccagcaccttactggaggattctaggcaggagctccacccccgagccacacccccaggccagctctgttgtttgtagcccaggctgacctccatcttaggatggttctgtcttaacctcctgagtgcagagatagccatgtttgccacatgccctgcctgctccttgtgtcctcttggtccttagggccctagccaccaacactaccatcaggggctaaggctaggtcacagctagggagaggccgcctgctggactgggaggggtccttgacctcattcactgccccctccctcccctccctccccctcccccccccttcccagctaaatcctaggtccctatgtgaaacattcgtagaccaggcctctgtcatttaggaccttcccacacccacacaccccctcctgagccgcatctgcagtggggcacacactgccttaggtactgggctccaccaccacacccaatcccttcctggcttccagtggataggagtagaggtctgggcaaccagatcatgggcaagcctggtacactttggggtgttagtgcagacactttggataccctcttgttgttggggtcccctggaagaaggcatgtagccaagcagaggaagtaatccctcaaacactggtccaggagaccagaaagtctgggcacgcttggagtggccagagaggtgtgactttccctagggggcactgctgagcccctgctctggtcatcacggagtacactctccagggtctactccattaaacctgctgatccagcagcttttctggtgctgtgggccacctccccgccaccaggggaggccctccctcagggacactcctgggaccccgtgggatcaaagacttcagagcctcactgtgactttccaggtgccccagagttatggtctaggagttcccatcaaacggagactgcagcctagtagcctgagaggattcctttggtaaaaaataaaaacaaaaagcctgtcatggcaggtgttgccaccctctgggcctcaggcctccacttcacacactgccctaagagggtctagaaccaggggcagtctcatgtagctcaggctggccttgatcaaacttgctgtagctgagccggaccttaaatttctatcctctggcctccatgtggccagtgctggagatgagagagtagctgagctgcctagctggccttgactttatggtaatcttcctgcgtcaccctcccaagttctggaacagcagaagtgtgcttaactaccattaagggccagtaaacccctgtggacagtggcagacggctggcatacctggattgttttgagtcctgtttattacatttcagctacgattggggaatgactgtcagctgatgctggggggtgtggccaggttcccttcattgaaaagtttaacttattcattcatggggggggggggtagggggagtgcagattcagtgggagctgggtccttccttgcactacactggtcctggtgactcagagttcagtcatcaggctgggcaacaagtccctttaaccggtgaactaccttgccctccctgcccgggtgcttgctcttctggccaggtctttgcatcaagagatggaaatgaggcccagcgagttagttcactcagggagttggtggactgtctaggcatagaccatgagatatgggtatcaagtttgg

SEQ ID NO: 2566 - DNA, 1589 bp, Mus musculus
cacgcgcgggcgggtgggcggagcggcccccctagcgggggctgtgaagcgcggggagggggccgagcgggtggcgaagccggcgcgcgcccggctgggggcggagggcggaggcccgtgggacagaacagctgcggcgagtggcggcggcggagggagccgaatcggcgacgagcccgggggtcgcaacttgcagaagcggcggcggcggcggcatcggccacggcgggcggaaaagccggggcgcaatggagcggaagaggtgggagtgcccggcgctcccgcagggctgggaaagggaagaagtgcccaggaggtcggggctgtcggccggccacagggatgtcttttactatagccccagcgggaagaagttccgcagcaagccacaactggcacgttacctgggcggatccatggacctcagcaccttcgacttccgcaccggaaagatgttgatgaacaagatgaataagagtcgccagcgtgtgcgctatgattcttccaaccaggtcaagggcaagcctgacctgaacaccgcgctgcctgtacggcagactgcatccatcttcaagcaaccggtgaccaagatcaccaaccaccccagcaacaaggtcaagagcgacccgcagaaggcagtggaccagccgaggcagcttttctgggagaagaagctaagtggattgagtgcctttgacattgcagaagaactggtcaggaccatggacttgcccaagggcctgcagggagtgggccctggctgtacagatgagacgctgctgtcagccattgcgagtgctctacacaccagcaccctgcccattacaggccagctctctgcagccgtggagaagaaccctggtgtgtggctgaacactgcacagccactgtgcaaagccttcatggtgacagatgacgacatcaggaagcaggaggagctggtacagcaggtacggaagcgcctggaggaggcactgatggccgacatgctagctcatgtggaggagcttgcccgagacggggaggcaccactggacaaggcctgtgcagaggaggaagaggaggaggaagaggaggaggaagagccggagccagagcgagtgtagcacaggtgccctgcccaagtctgggctgcagactgccttcagccttgcctggaccaggtaggggccagacctgtaggaggcagccgtccacctcctttccaaagcctcctgcttccaggtctcagtgcagggagcccctgtggaccttgaactcacttgtccctgcgctgcctggcaggaagccccacactgaaagcagatgagcagtgacccaactgagaggccacctggacacagtcacctccctgcctccttatcataggacaaggccttgcttggcaccgaggagctgggagccgtgttgggtgctggaggaagtttctggaaacacacctggctatgcccaccttatgtccctaaggctattacaggccagggtctggactgctccggcccacagggctgcccagcctccccacactgagggtcagcagcccaccaggaagtcactttccttcaataaactgatggtaggaacttgtg

SEQ ID NO: 2567 - protein, 285 aa, Mus musculus
MERKRWECPALPQGWEREEVPRRSGLSAGHRDVFYYSPSGKKFRSKPQLARYLGGSMDLSTFDFRTGKMLMNKMNKSRQRVRYDSSNQVKGKPDLNTALPVRQTASIFKQPVTKITNHPSNKVKSDPQKAVDQPRQLFWEKKLSGLSAFDIAEELVRTMDLPKGLQGVGPGCTDETLLSAIASALHTSTLPITGQLSAAVEKNPGVWLNTAQPLCKAFMVTDDDIRKQEELVQQVRKRLEEALMADMLAHVEELARDGEAPLDKACAEEEEEEEEEEEEPEPERV

SEQ ID NO: 2568 - DNA, 1665 bp, Mus musculus
cacgcgcgggcgggtgggcggagcggcccccctagcgggggctgtgaagcgcggggagggggccgagcgggtggcgaagccggcgcgcgcccggctgggggcggagggcggaggcccgtgggacagaacagctgcggcgagtggcggcggcggagggagccgaatcggcgacgagcccgggggtcgcaacttgcagaagcggcggcggcggcggcatcggccacggcgggcggaaaagccggggcgcaatggagcggaagaggtgggagtgcccggcgctcccgcagggctgggaaagggaagaagtgcccaggaggtcggggctgtcggccggccacagggatgtcttttactatagccccagcgggaagaagttccgcagcaagccacaactggcacgttacctgggcggatccatggacctcagcaccttcgacttccgcaccggaaagatgttgatgaacaagatgaataagagtcgccagcgtgtgcgctatgattcttccaaccaggtcaagggcaagcctgacctgaacaccgcgctgcctgtacggcagactgcatccatcttcaagcaaccggtgaccaagatcaccaaccaccccagcaacaaggtcaagagcgacccgcagaaggcagtggaccagccgaggcagcttttctgggagaagaagctaagtggattgagtgcctttgacattgcagaagaactggtcaggaccatggacttgcccaagggcctgcagggagtgggccctggctgtacagatgagacgctgctgtcagccattgcgagtgctctacacaccagcaccctgcccattacaggccagctctctgcagccgtggagaagaaccctggtgtgtggctgaacactgcacagccactgtgcaaagccttcatggtgacagatgacgacatcaggaagcaggaggagctggtacagcaggtacggaagcgcctggaggaggcactgatggccgacatgctagctcatgtggaggagcttgcccgagacggggaggcaccactggacaaggcctgtgcagaggaggaagaggaggaggaagaggaggaggaagagccggagccagagcgagtgtagcacaggtgctgcaggccagggtgggatgtcagcccatcccctagccgggctgctaacagcttcccttcctgcctattgcaggtgccctgcccaagtctgggctgcagactgccttcagccttgcctggaccaggtaggggccagacctgtaggaggcagccgtccacctcctttccaaagcctcctgcttccaggtctcagtgcagggagcccctgtggaccttgaactcacttgtccctgcgctgcctggcaggaagccccacactgaaagcagatgagcagtgacccaactgagaggccacctggacacagtcacctccctgcctccttatcataggacaaggccttgcttggcaccgaggagctgggagccgtgttgggtgctggaggaagtttctggaaacacacctggctatgcccaccttatgtccctaaggctattacaggccagggtctggactgctccggcccacagggctgcccagcctccccacactgagggtcagcagcccaccaggaagtcactttccttcaataaactgatggtaggaacttgtg

SEQ ID NO: 2569 - protein, 285 aa, Mus musculus; identical to SEQ ID NO: 2567

SEQ ID NO: 2570 - DNA, 36416 bp, Homo sapiens
gaggcactgtggggttgtgtctcagagtctcagacttaggactgagagggccacagttcaccagctggggaccctgcagtccacaccccttctaggccctgctggggcttgctttgaggaaggggttgtcgtggcgacgaggtcgttggtcagtgtggtcatggtctgtacgtccttcctcagtggctagtggaaatcaggttttgtgggctcttcccacactgtccaaatccacagggtcctacatggggtgaccaggatgataggggaggcggaggccggcccactgggcatatttatgagcaggcttctctggtgattaataacccagggctgggcgcagtggctcacgcgtgtaatcccagaaccttgagaggctgaggtgggtggatcccttgaggtcaggagttcgagaagagcctggccaacaaggtgaaaccctgtctctactaaaaatacaaaaattagtcgggcgcggtagtggacacctgtaatcccagcttcatgggaggctgagacaagagaatcacttgaacctgggaggcgggggttgccgtgagctgagattgcgtcattgcactccagcctgggtgacagagcgagattctatctcaaaataaataataaataaataaataaataaataacttatccagaatgccatcaagacaacacgtgcgaagattcctgccctgttggtggcatctgcctccgagccaggttccaggagcagctgtgcgtgcccccagctggtgagcgggcacctggcctacacttggagagtctctggtgaggccccttggggcaatgtgggcagggtttcttcatccgcctccaggaggagcaccccctaccgccccaacatcccagctgtgtgatttgctgtgatccagggaggtgaatcggatttttttttttcttccgagacagagtctcactgtcgcccaagctagagtgcagtggcacgatctcggctcactgcaacctcgacctacagagttcaagtgattctcctgcctcagcctccccagtagctgggactacaggtgcgcaccaccacaccgggctagtttttatatttttagtagagatgaggtttcaccatgttggccaggctggtctagaattcctgacctcaggtgatccacccgcctcggcctccggaagtgctgggattacaggtgtgaaccgccgcaccccgcccggaattggattttaatttcagccctctgttggccagcagtgggacctgcaattgttatctagtgctgtgtgcataagaaatggtctcccaaaattagccgcttaaactagcaaatgctgcttatctcacagtttcagtgggtgcactgagtcaactcctcaggctctcttgtgaggctgcagtctcatccgagggtgtgaccaggcagatccgtttccacgatcactcacggggttgttggctggattcatttatttcttcctttttttttttttttttgagacggtgtctcgctctgtcaccaggctggagtacaatggcatgatctaagctcactgcaagctccgcctcccgggttcatgccattctcctgcctcagcctcccaagtagctgggactacaggcgcccgccaccttgcctggctaattttttatatttttagtagaatggggttttaccatgttagccaggatggtccctatctcctgacctcatgatccgcccacctcaccctcccaaagtgctgggattacaggcgtgagccaccatgcccggccctcatttccttcttagctggaggctgccgtcagttctctgccacatgggtcccttcatagggcatctcacagcatggcagctggcttctccagaggcagctagaggttgcacaaaggtgcccaggatggaagccagtctttttcttttttttgagacggagtctcactttgtcacccaggctagagagcaatggtgcaatcttggctcactgcaacctccacctcctgggttcaagccattctcccgcctcagcctcccaagtagctgggattacaggcacccaccaccatgcccggctaatttttgtatttttagtagagatggggtttcaccatgtttcccaggctggtcttgaactcctgacctcaggtgatctgcccgcctcagcctctcaaagtgctgggattacaggcgtgagccaccacgcccagcctctttttcttttttaattttttttgagatatggtctcatatttaccgaggctggaaggcagttggtgtagccacagcctctgcttcctgggctcaagagatcctcctgccccagctttcctagtagctgagactactggcatgtgccaccacacccggctaatttttcttaattttgtgtagagatggggtctcactctgttgtctaggctggtctcaaactcctaggctcaagtgagcctcctgcctcaacctcccaaagtgctgggattccccttgtgagcctccatgtctgaagccagtcttttgtcacttgacctcggcagtgatgccccattgctcatgctgcgttctactcattagaagcctgtgcccggccgggcgcggtggctcacgcctgtaatcccagcactttgggaggccgaggcgggcggatcacgaggtcaggagattgagaccatcctggctaacacggtgaaaccccatctctactaaaaatgcaaaaaattagccaggcgcagtgacgggcgcctgtagtcccagctactcgggaggctgaggcaggagaattgcttgaacccgggaggtggagattgcagtgagccgagatcacgccactgcactccagcttggtgacagagcaagactccgtctcaaaaaaaaaaaaaaaaaaaaaaagaagcctgtgcccaagttcatactgtgcgagggcgtaaacgccagcaggcgggtttgctgggccttcctagaatctgctgggccttcctagaatctgctgggccttcctagaatctgctgggcccaggcaactcaggggagctctcacagcacgtgccgtggtgggcaagagcgtgagcttggaaccggaggcctcgatcctcgccagctgtgtggcctcaggtgagggcctcgccctgtctgttgtttggtgtcctcgcctgggaacagggactgtgatggcggcacctgcctgagtcctgcagctgtggcagggatggatgaatttctgcagactgcagcagaccggacccatcatcatggtggttgcaaacttacaaacacctacacatgcgccaggcccagcctccccccagctccactcccaccccagcagccccttgagcagttactggcttcctgagagccggcagcatgggcagggcctgtgctgctggtgccagccctcagggctcacagcactgggcgggcacaggtgccaggcccgcacctcagccatcaccgctcaggacggggggccggggtgggcaggagagggtcttggagaaagggtccagagcaggcctgaccatcccctctcctctcgcagggtcccgacggcctacacatggggcgctgtgggcgccgtggggctggtgtgggccaccgattggcggctgatcctggactgggtaccttacatcaatggcaagtttaagaaggataattaattacacaaacccttcacagactgctctggtaagtttcagtgggctgcggtgggtggactgcatgatggccggatggtggccgaagagtgggttctccaggctcccagagccggggcggcagccctcactgctccccctggagagacctgcattcgagagtggggccctgggtgccccttctggcatctccggcccacgggcacagaactgtccgccccgcagccttgggttgtgtgattggggtgtgggcctcgccctccctctggacaatcccagtgagtctttgaggcaaaccttgcttccgtctcagtgggcactgcagcctgaactgggtggggcccatgttacagacagagggggaaggtggaggctggcccacagtggctggacaccccatgagctcttggaagcgcctgtgaggccctggacgcatccacgtgtttctccagcatgccagctgcccccttaaccacagtgcctgtggcatcttcccagtgcccacatgacagtcccacgtggccgtgctcttacacccccattttccaggtgctggcctgaggcctgaggccatgccactgtttgaacctgggcctcagagccctgctccggtctgtgtttctccctactgcgtggagcccggggcctgtgctgcattggtgttcctgccaggctgctgtcctgggccacttccgcagccagcttcatatggaagggacgtttctttttttttgagacggagtctcgctctgttgccagactggaatacggtggcgcgatctcagctcactgcaccctctgccttccaggttcaagcgattcttgtgcctcagcctcccaagtagctgggactacaggtgcccaccactacacgcagctaatttttttttttttttttgagacagagtttggctcttgttgcccaggctggagcgcaatgacgcgatcttggcgcactgcaacctccacctcccgggttcaagcgattctcctgcctcagcctcccaaggagctgggattacaggcatctgccaccacaccaggctaattctgtatttttagcagagatggggtttctccatgttaatcaagctggtctcaaactcctgacctcaggtgatgcgcccgcctcggcctcccaaagtgctgggattagaggcgtgagccactgcacccagcctggaagggacacttctactcaccctgcctcgtctgctctccctccaggtgcctggtggtgctagctcctcccacctcagcacctgctgcatctggagcagcccaagcctcaggatggacaagaggaaacccacagctcagcttcaggcttcttatgtttctgaaaacagcttggatattttaatgcacgttgcattaaacctcactgaaacctgctccgtgcccggatgttgatcatgctggtggcttggttactgtgactgtagctggagtggcacaggtgacccaggcgtcctttcagctccagaatgttgcaagtctaggagagtgttccaatggctgacagaaactgcctatttgaaatggctcataagtagtatctgcagtgtgttcatccgttgctgccttaacaagtcacccacacgtagtggcttaaagcaacgaacattcactctctcacagtctgtgtcagtcggggatttgggagtgatgtatctgggtggttgtggcccagagtctctcatgaggttgcagttaagacatcagccaaggccacttcgtctgaggaaggctcaactggggctggagccacttccaagccagtgccctcacgtggctgtcggtgacagccacagttccttcccatgggggcccctacacgaagctgcttgagcatcctcacggcatggcctctgccttccccagagcaggtgaaccaagggagaggaaggagcaagccacagtgcttctatgagccaccctgagaagtctcacgtgatcacttccgccacagcctgtttatcaaaagcaagccccccaggcccagcccacgtgcagagggaggagaatgaggttctgtgttttgaagggaagaatatcagaattggtagacatttcaaactgtcacattagggatacaaaaatgaacaggctgggagtggtggctcagcctacaatcccaacactttgggaggctgaggaaggggcatcacttgaaccaggagttcagtactaacctgggcaacaaagaggcccctgtctctgataaaaagaaaaaaaatgaaaaaataaaaatgaacaggtataaaaagagaatatggtacaaagtcacactccctgatacagctgcccagttttttccagctcttgccaatctctgagccgacattgcaccactgcactctagcttgggcaacagagtgagactcaaaaaaaaaaaaaaatcctagacatactgtctgcatacataagtgtgttgatggaaatagctattatatcagtctgctagggctgccataacaaaataccacagattttgcatggctcaaccaacagaaatttattttacttattcttttttaaaagacagtcttgctctatcgcccaggctggagtgccgtggcacgctcttggctcactgcaacctccgcctcctgggttcaagcgattctcctgcctcagcctcccaaagtgctgggattaacagctgtgagccactgcaccaagcctatttatttatttatttttggagatggaatcttactgtgtcacccaggttggagtgcagtggcatgatcttggctcactgcaacctctgccttcagggttcaagcgattcttctgcctcagcctcccgagtagctgggattacaggtgcctgccaccacgccctgctaatttttgtatttttagtagagatggggttttgccatgttggccaggctagtcttgaaatgacctcaggtgatctgcccacctcagcctcccaaagtgctgggattacaggcgggagccactgtgcccggccagattttgttctgatttttaaaaaaacattggccaggggtctgtgcgtggtggctcacgcaccactgcactccagtctgggtgacagagccagactctgtctcaaaaaatatataaaaatttaaaaaaaaaaattgtctgcaggctaagtgtagtggcccacacctgtaatcccagtactttgggaggccacagtgagaggattgctggagcccagaagtttgaggctgtggtgagccgtgattgtgccactgcactccagactgggtggcagagtgagaccctgtctcaaaaaagaaattgtgtgacttgagccctgaatctgtaggttaccagaccccagtagcagtgagcttcccctgcctatttctgtatctgctgtcctggtacttaagtcccgaaagggaaggcagagacttcagcatggtggcactgaggccctcgccagcccaggaggtgacaggagccagactggcggatggggtcctgtgtttgttgccacagtgagtcactggactccactgtaaagaggagcagtctcgtggtcccatcagccatttattcagtcatttatttctaccagcatccactcgaggacattttttctttttccttttttttttttttgagacagagtctcgatctgtcgcccaggctggagtgcagtggcgcgatctcagctcactgcaacctctgcctcccaggttcaagcgattctcctgcctcagcctcccgagtagctgggactacaggcgcccgccaccaagcccagctaattttttgtattttttagtagacacggggtttcaccgtgttagccaggatggtctctatctcctgacctcatgatccacccgccttggcctcccaaagtgctgggattacaggcatgagccaccacacccggccttgatgacattttttctacagactataaatcctttataaactttaattttgttgctcaagttgtcctctctgtttggccatcgtgaccccttccaaatgggctcctgtgtgcacatgatatgtcccgggtcactttttttgttattgaggtgaaattcacataacataaaattaaccattttcaggtgtgcaatgcagtgctttaatacattcacactggtatgcagccactgcgcccagcctggaattggccattttaaagactattttattgacttacttattttagacaaggtctcgctctaccacccaggctggagtgcattgtcacaatcatagcccaattttaaaaataatcttggccgggcgcggtggctcacgcctataatcccaggactctgggaggccaaggcaggcggatcacctgaggtcgggagtttgagaccagcctgaccaacatggagaaaccccgtctccactaaaaatacaaaattagccgggcatggtggcgggtgccaccataataatcatctcccttgcatgggggcaggccttgcactggctgccctagtcaagtaatcccagctacttggaaggctgaggcaggagaatcgcttgaactcgggaggcggaggctgcagtgagccgagatcgcgccgctgcactccagcctgagcaacaagagcgaaactccgtctcaaaaaaaacacaaataattaaattaaaaaaataataataatctcccagccgggcgtggtggctggcgcctgtgatcccagcactttgggaggctgaggcaggcacattgcttgagctcaggaggttacagtgagccaagatcacgccactgcactccagcctaggcaacaaagtgaaaccctgtctcaaaacataattatcatctcccttgcatgggggcaggccttgctctggctgccctagtcaggtaccacggctggttctggggtgtaactgcctggctttgagtccacagcatagactttcctgtctccttgggagcactgattcttccatggcagcccaatgccatggggcctcggtctcaggccagtaaccagctcctgagcttctcgggagacagagctggctgtctcacacctcacctcacctcacgacgaggtggggtgagcggggcatccgaccatcatccacccatccatcctgatttattcagtgcttctgtggtcagcacaacatcccgaaaatgtgcccgttccgtcggccgctgtggctcacacctggaaccccagcacttagggaggccgaggtgggcggatcacttgaggtcaggagttcgaaaccagctggccaacaaggtcaaatcccatctcttctaaaaattcaaaaaaattagccgggcatggtggtgggcgcctgtagtcccagctacttgggaggctgaggcaggagaattacttgaacccgggaggtggaggttgcagtgagccgagatcacgccattgcactcgagcctgggcaacagagcaagactctgtctccatcagtcagtcaatcaatcaataaatgaatgtgcctgtcctactccctggaacctgcagctaaagggactttgaaaatgggacgagatcttcagatgggaaagcatcccagatcgggtggacccaatgtcaacaaaagagtccttagaaccaggacagtttctccagctggaggcaggggagcacagcagctagactcagtccttgaacacctgtgcaggcccgcccagccctagccttgggagcgacgctgtcagggggaactgatggggggcagcccacccgtttccatttcaggatccctctggctggctggggaaggggttaaggggagacaacagggggtgggcgattccgcaggaaggtcctggaactctcccggccagagatggtggctggactaaggtgcagggggtggtcggggagctgggggggggtgctcagattcctggattttgagggttcaaaaagcagctggacggggcgcagtggctcacgcctgtaatcccagcgctttgggaggccgaagtgggctgatcacctgaagtaaggagttcgagtccagcctggccaacatggtgaaatcccgtctctactaaaactacaaaaattagccgtccgtggaaccagctacttgggaggctgaggcataacaacttgaacccgggaggcggaggctacagtgagccaagatcgcgcctctgcactccagcctgggtgacagagaccccgtctcaaaaaaaaaaaagctactggagggaacttgggggcgtggaaggggtggtcacgggggaagtcccccagatttggacgctcgtaaaaagctcggaagctgggagaccaggagggcggggaagtcgaggtccagtcactgggccagagtccccaagacttgggctggagaaaggtcggaggaaaggaccccactagtccgaaagcatgtccccgcgcacgcgcaccaggcggccggcagagacagggcacagtaaaaggagccgcgcggactccgggcacagctgctgggcactggcagctcgcaaggcacagcgcgcaggcgcgcacgccacttaaggccccgccccctcccagcgcgctgattggcggggccgtagaggggcgggggcatggcgccgcggctgcgcagcgcggggccccgcgcgggcgggtgggcggagcgggccccccgagcgggggctggcgagcgcggggagggggccgaaagggcggcaaagccggcgcgcgcccggctgggggcggagggcgggggcccgcgggccggaacagccgcggcaagtggcggcggcggcagcggcagcggaggcagctgaggcggcggcggcgagtgggggtccgggcggcggcggcgggcccggcggcgggccgaggagccgggcgcaatggagcggaagaggtgggagtgcccggcgctcccgcagggctgggagagggaagaagtgcccagaaggtcggggctgtcggccggccacagggatgtcttttactataggtgaatgagcgcgccggccgcgcagggcctcaacgggctcctcccagcggcctctgcggcggcctcggcgcccctgccccgggccgcggcctgggccccgcgcgtgcgtcgtgcgtgcgtgcgtgcgtcttgcgtgcgtgtgcgcccggcgcgcggaggcccagtgcgcgtgcgccgcttgttgggccgcatggctttcggccggccgttcagggactggctgccggacggcgactgcggcctttgttcgtgcgcgctgggccaggggcgcctggcggcggccagatgctaccggggggcaggggtggagggtgggctgtccctttggttcccgtgagacgcagggggtgccttcttggggcgctcctggggtggcgcggagcccgagggggtggccagccgggatttcggggagcagggctcatgggcggatcggggagggcgtgcgtgaaaatacgggttcttgggctcgccccagtcctgggaataagcgcctcagggtgactggtctcccacgcagcgttgctttttttaaaggtattccccttgactccttccgaggcctctggtcctcttgggtcgtggccccctcagggtggagacctgaggctttcgactttccgagcccacctaacggtagtctttgcgtggatgttactggtggtggaaggctttcagagacccccccgtccccaaattggaacaaggcgctgctctgaaaggtcgcagggaaccccctccgtggaacaaagacttagtcgcctgctgcagccaagtcccagacagtcggccacctgctgtttgtcctcttttttttttttttcctggctcgggaaagatgcttttgattctgggccagctttgattgcgccctccccttggttcagtgtcccgtggcgccttcaggtcccccaggaggggaaagcggaggacgcctgccatgtgccgagcacctgggtaaaggggggtgtgcggctggtccccctttttcccacagctcggggtcgtgggcaggagaccgcccaggtgagggcgggtggtttccacgagccaaggaggggcagaacgaccgctccgtccactgtgcacttcggtcctctgtggttcttgactgtcccggtttggggagataaagtgagaaaagtgagcggggaaaggatggctgtgatcagaagcaatgtgtggggcctcgtcctgcaggaggagctcagggactggttcctggaaagttggaggacagcaagagaggggaaacttggtccccaaatgtgtacccttatgagctggaaccctgtacacgtcctgagatctgcagtgacacatgctgaaatctgggagggcagatgacggggcctgaatgagactggggtcagggagggcttctctgaggacgtgacattgagtgacagggagaggcgtccaggcagcaggaaccccctaagaggtggctgcagcttgggagctagaaccaaggccagcttgagcggagtatcctgaggctgtcatcaccccacctctctcattcccactctgggccctggccctgagcatgagggtctagcagtggagaaaagcagggagaagctcctctacaggctagagatttcaggtttctctgcagagggtgaagccaggcagcccagagccgccctctgcaggtctggggcctcaacccagcccttcatctgaggctgcaggctcccagactgcgttttctgttgggggtgcctggggagagttcaggccatgttgcccacttttttctatacgtgtggttttatcaaggctgttcttttttcattgaataaaatctcagggacatcattttgtgtcaatagatgggcataacctttatttaaaattgagatataattcacattccacaaaagctaccttttttgttttttttctttgagacagggtctcacccaggctggagtgcagtggtacaatcacggcttacgcattcttgacctcccaggctcaggcgaccctctcagctcagcctcccaagtagtgggaattacaggcacgtgccaccatacctggcttatttttatagagatggggttttgctgtgttgcctagactagactggtctcgaattcctggactcaagcagttaacccgcctcagcctcccaaagtgctgggattacaggcatgagccactgcctggccaaagccactttttagaaatgtacaattcagtggggtttttttttggagatggagtttcactcttggcccaggccacagtgcagtgacgcaatcccagcccactgcaacctccacctcccgggttcaagcgattcttctgcctcagcctcccgagtagctgggattacaggcgtctgccaccatgcccggctaatttttgtatttttagtagagaaggggtttcgccatgttggccagactggtctcgaactcctgaccccagcacctcagcctcccaaagtgctgggattacaggcctgagccaccacacccggcccccagtggtttttagtacattgacaaagttgtgcaaccatcaccgctatctaattccagaacattctcatcaccctgaaaagcagctctgtcctcattagcagtcactccccacttgttactcccccagcccctggtaaccactaaccccctctatcttgcatttgcattcattcattcatttattcattgtgagacagggtcttgttctgtcacccaggctggagtgcagtggtgcagtcacagctcactgcattccttgacctcctgggctcaagcgatcctgcctcctaagcctccagcatagctgggactacaggcatgtgccaccatgcccagctaattttttatgttcattattatttatttattttgagaagtagtcccgctttgtcacccagggtggaatgcagtggtgcaatctcggctgactgcagcctccacctcctgagttcaagcgattctcctgcctcagactcctgagtagctgggattacaggcccccaccacaacccccagctaatttttatatttttaatagagacggggtttcaccatgttggccaggctggtcttgaactcctgacctcaggtgatctgccctccttggcctcccaaagtgctgggattacagatgaaagccactgcgcctgccttcttttttttttttttttttttttttgagaccgagtttcgttcttgttgcccaggctagagtgcaatgttgcagtgcaatgctgcaatctgggctcactgcgacctccacctcctgagttcaagcaattctcctgcctcggcctcccagctagctgggattacaggcatgtgccaccacgcccggctacttttgtatttttagtcgagatggggtttcaccatgttggtcaggctggtctcgaactcctgatctcaggtgattggccctcctttgcttcccaaagtgctgggattacaggtgtgagccactgcatttattctttttgagaaggtgttatcgagatacagttttatgtaccatacaatacagtcatttaaagtgcacgagtcaatggtttttcagcatattcacatatttacggatataggcagctatcctcagattcaattttagaatttccatcaccctagaaagaaccccaggcccatttaccactgccttgtgcgcccacccccagtcttaacaaccaggctgtggtctgtgtgtgtctcttgttcgccttacaccttttttttttttttttttttttggagacacagtcttgctctgtcgcccaggctggagtgcagtgtcatgatctcggctcactgcaacctctgcctcctgggttcaacccaattctgcgtcagcctcccgagtagctgggactataggcacgtgccactgtgcccggccaattttttgtattttagtagaaacgggtttcaccatgttgcccaggctggtctcgaactcctgagctcaggcaatccacccacctcagcctcccaaagtgctgtgattacaggcgtgagccaccgcgcccggccttgtttcccttcatcttaaaaggcagaacggcctctctttggggtgaccggaggcaaagagctgttgggagtgttttgtggggtctcttcttccttccttgtggctacatgaagcctgagtctcagcctctggtttcttggtttctttccactgccctgggcaaaccagcttcgactgaacgtcagccagtccagagagtaattaaaagagttaagtctcaaaagtaaatctccgggaagagccctcagtggtttcagacccccaggcacttgtcctcgtgccctccctgaggcgtcctgtcctactggacatgctggagcctgcccgtgtccttgtggaccatggaatttgcccggggttggggggcaggggtggagagaaataaaacttcctgtgatctatgtatcggcccagtacatagatcctggatagaggcgattgagctaagcatgggaccaagcatttctgtgcagtgcctgcagaattgagtttccttctggctatgggagattcttctgagctgtctcagttgtctgacatctggcatctgccatgggccaggacgtctggggcaggggcagaagaggacaggaggagactgccctagaggattctgggaaaacgggaaaacagcaaaacagagctacccaccaatctcaggctgatgcattattaataaaagtgactgttgactgagtttgtagacataatatgtttgaggtacctggcctagtaagcaccatacaagtgctattatttctaaatgattttatcaagataaaagacaccagccaggcatagtggctgccgcctataatccctttgggaggtcgaggcaggaggatctcttgagatcgtaagttggagaccaacctgggcaacatagcgagtccccatctatgcaaaaaatttaaaaattagctgggcatggtggtgcacacgtgtagtcctagctcctcaggaggccaaggcaggacaatcccttgagtccaggaggtcaaggctgcagtgtgctgtgatcacaccactgcactccagcctgggcgacacaaggagaccctggatctaaaagtaaaaatgaaaaaaaaaagaaatgaagcagcagggcgtgatgactcacctttaatcccaaagctttgggagggaagatgggaggactgcttgagctcaggagttccagaccagcctgggtaacatggtgagaccctatctctattaaaaaaatataaaaattggctgggcgcggtggctcacgcctgtaatcccagcactttgggaggccaaggcagccagatcatgaggtcaggaggtcgcgaccatcctggctaacactgtgaaaccccacctctactaaaaatataaaaaattagccgggcgtggtggtgggcagctgtagtcccagctactcgggaggctgagtcaggagaatggtgtgaacccggaagtcggaggttgcagtgagccaagatcgcaccactgcactctagcctgggtgacagagcgagactccgtcttaaaaaaaaaaaaaattaggccgggcacggtgactcacacctgtaatcccagcactttgggaggctgaggcggacagatcacctgaggtcaggagttcgtgaccagcctggccaacacagtgaaacctggtctctactaaaaatacaaaaatcagccaggtgtggtggcgggcacctgtactcccagctactcaggaggctcaggcaggagaatcacttgaacctgggaggtggaggttgcagagagccaagatcgagccacttcactccagcctgggcgacagagtgagactccatctcaaaaaaaaaaaaaaaaattaggcgtggtggcttgtgcctgtcgtcctagctacttgggagactaaggtggaaggatcaccctagcccaggagttcaaggttgcagtgagctgtgattgagccattgcattccagcctgggcaagagtgagaccctatctccaaaaggaaagagagaaacgaagtcctgtccctatcagcagccactccacatcctgcaccccagcctctggcactacgcgtccccttcctgtctctgaattatcctgttctagacatttcttagaaatgggatcacacactgtgtggccttttgtgtctggcgtctctcactgaatgtggcgtcctcaaggtgcatccacgctgtggcctgtgtcagagcctcgctccttttcatggctgagtatgtcccatcgtgtggatgggcgtttgtccgttcatccattgaaggcgtctgggctgcttccaccttctggctcctggggacatccgtgtagaagtgatggtgtggatgcgtgctcatttttcgggcagatacctaagagtggcgtggccgggtcatctggaaactcagtgaagagctgtcaggcttttccaacatggctgttccatcttacatcccaaccatgatgacggtgtgttgggttgggtgcttgtcatcctgtagtgtgacctcatgtgacacacagggcaacccattggtgggtgtccttatgtcctggagaggatgagttgccggcgcttgtccatggcaggctgagagcagagccccgtgtctgagagcaggtctgtgtttacctggctgccttgttgcgagctctccagtcgggttatgcccaagcagctgttagggcctggccccagatcttagaacgagaccccttcccagtctggccctgctgctgtaaccccaaggtggaagaagattgcttttagggctgtccctcacatacctgttctccgtggggtcttttctcaagaatgtgacctaaattccatgtctggaatgttctggacatgtgagccatcctcccagagccggggcccaaagccctgtaggtagtagcgtttgtacccgaactcagcgtctgctgtgcctgacgctgccagggcctacggtggggaggattcagaggggaccggggttgggggtctggagcaaggatccgatgtggaggctggggctagggccagggtgtgaggatcggggccagtgctctgggtctggctggcgcccagatctaggggccagttgtggggtgctggggtctgggatgaaggtctggggtcacgccagggttggggtctggggctggggccagggcctgcctgggtttggggtcagggccgtgttggggtctggggctggggtcgcgacctgaagctggggctgggactgggtttgggtctgcggccgaggcctgggtttggggtctggggtccgcccggggcgccgaccgtcccgcctccccgcagcccgagcgggaagaagttccgcagcaagccgcagctggcgcgctacctgggcggctccatggacctgagcaccttcgacttccgcacgggcaagatgctgatgagcaagatgaacaagagccgccagcgcgtgcgctacgactcctccaaccaggtcaaggtgagtggtggcgtcacgcaggtgacgtcggcgcggggcgttctaggcggggacgcggccatgacgtgagctgcaggcgacacagcccggcgtcctgagcgcaggaggtcacagcgggcggagggcacagagcggaaggcgcaggccacagggtgcagagcgcaaggcgcatggcgaggacgcggcccgcggcgggcgttccagagccggccggaccgaccctgcgggagcggcctccccggaccgtgggggtcctggcgggcgcgggggacacgaggggcgccggcaaagcagggggtcacccgggccccgcaccccctgaggctccgcgccgccggggcgcccccaggccggactgcatatccttcctcccgcagggcaagcccgacctgaacacggcgctgcccgtgcgccagacggcgtccatcttcaagcagccggtgaccaagattaccaaccaccccagcaacaaggtcaagagcgacccgcagaaggcggtggaccagccgcgccaggtgagctcaacgcacagcgaccccagccttcccggccgggttgttcactttggtgggtggacgtttggaatgaggtcgtacgtggagcggacgtagtgagcgcaggagttccaggctagcctgggcaacatgacgaggcaaaaaacaagtaaaaaattagctggacgtggtggcgcccgcctgtggtcccagcttctggggaggctgaggtgggaggattgcttgagcccaggaggctgaggctgcagtgagctatgatcacaccactgcactccagcctgggggcagagcaagacccagtcctgcggtcccctcttggaatgtgcagggtattggtgccaggatacgccccaccctcaacccccagataccaaaatctggggatgttcaggcccctcagaaaatggtctagtatggcctcacgcggtgactcacgcctgtaatcccagcactttgggaggccgaggcaggtggatcacctgagaggtcaggagtttgagaccaggctgacccaacatggtgaaaccccgtctctactaaaaatacaaaaattagctgggcgtggtggtgtgcgcctgtaatcccagctacccgggaggctgaggcaggagaatcacttgaacccgggaggtggaggttgcagtgagccgagatgacaccactgcactcctgcctgggcgacagagcgagacccggtctcaaaaataaaataaaaatatttttaaaaaatggaaatggtctaatgtttgcacgttacctgcaggtattttctagcttgctcatgaggtgtggatgcttgtgacgttccttgtgtgtgttttattcatttttttaagtttttcactttcgagacagggtttctgtatgttgcccaggctggtctcaggctcctggcctcaagtgatcctcccaccttggcctccaaaactgtggggattacaggtgtgagccaactcacctggccagttgttgtatttatttattttttttccccccaaatattttcagtctgccgctggttgggtgtgtggttatggaacccacagatacagggggttgactgcccatatgtgactgtgtaacctacttcttaaaaacctgagaaccgtgtgtattttctttttgttttttcttttttttttttttttttttgtgacagagtctcgctctgtcacccaggctggagtgcagtggcaggatcttaactcactacaacctctgcctcctggtttcaactgggttcaagtgatccttccacctcagcctcacaagtagctgggatttcaggtacccgtcacaatgcacggctaatttttttttttttttttcttttttgagatggagttttgctcttgttgtccaggctgtagtgcaatggtgcggtctcagctcactgcaacctccacttcctgggttcaagtgattctcctgcctcagcctcccaagtagctgggattacaggcgcccgtcaccacaccggacttttttttgtatttttagtagataaggggtttcaccatgttgaccaggctggtctcaaactcctgacctcaggtgatccacccacttcggcctcctaaagtgctgggattacaggcgtgagccaccccatgtgtattttttattcttatttacaaacgtccactggatccctggctgtggaaagcctgggcagggtctggagacccaaggcagtgggaggggagatgccccattgggacccacatggggcaaggaggccaggtgggcctccctggagcccagcaaggacctggagtggggagagggcagggccactcttgaggttcacatatgtgtctggggcagctcttctgggagaagaagctgagcggcctgaacgccttcgacattgctgaggagctggtcaagaccatggacctccccaagggcctgcagggtgagcgggcaccctgaggggaggcggaaggggatgtgccgggtggggtggaggtgctgcaggtgccctcatctcctggcagggtggatggctgttcctgctttgggtgcttagggcaaatctgccagcgactggggcaggaggaggggacccagtggggttggggatgggtaagggcgcttgggctgggcccttcattcttgaccttggagaccctgcgggtggggctttgtggcttccaggtgtggcgcaggcctggggctgttttcacctgcaggacgtgcagttttgccatggagatcctaaataaacaaacaaggacagctgactttgcttctgtactctcccagcacgtccacaccacagaacaaagaatgcagctcttgcatggttttggtggttgttttttgagacagggtcggctgggtacagtggctcacacctataatcccagcacttggcggggctggggcaggagtttcacttgatctcagaagtttaagaccagcttggacaacatagtgagaccccatctctacagaaaatacagagcaaggccaggtgcagtggctcacgcctgtaatcccaacactctgggaggccaaggcgggcggatcatgaggtcaggagatcgagatcatcctggctaacatggtgaaaccctgtctctactaaaaatacaaaaaattagccgggtgtagtggcggccgcctgtagtctcagctacttgggaggctgaggcaggagaatagcgtgaacctggcaggcggagcttacagtgagccgagatcgcaccactgcactctcctgggcaacagagggagactccgtctcaaaaaaaaaaaaaaaagatacagagcaagaccccatctcaaaaacaaaaggcagcctctccgtggcccatgctgaagtacagtggcgccgttactactcacagcagcctctacctcccgggctcaagtggttctctcagcacagcctcctgagtagctgggaccacaggtatgcagcgtgacacctggctaatttttgaattattttgtagagacaggagtctcactgtgttgtccaggctggtctcaaactcctaagctcaatcagtcctcccacctcgccctcccaagatgctgggattacaggcgggagtcgccacgcctggcctaacttgcttttttttctgttatgaatgtagtaacacaagcgggagagggaatttagaaatggaacccaagttggggttccttccaagaaggtggcagctcccattcttggggcatttccgtggcctgtctgggccacagctgccccgtggtgacctctccacttgcggctgtttgtccactgcctggcaggggtgggacctggctgcacggatgagacgctgctgtcggccatcgccagcgccctgcacactagcaccatgcccatcacgggacagctctcggccgccgtggagaagaaccccggcgtatggctcaacaccacgcagcccctgtgcaaagccttcatggtgaccgacgaggacatcaggtagccccttggcctggtcccctgctgctccaccctgtctcttgtggccgtggggaccctgagtgtccccgtgtgcctgcgtgcttcccgtctccccacgatgctgctggggttttgaaacagaaacagccagggcaaggggacccatcgtcggagcagtatgaaccgtttcacccgcgtcctgggttcagggcgagccaggcaccccttggaggaatgttcttgaaaagagtgtggtcctttgagtccgtgaggactggctatgctgggtgctgggctccatgttgggccctggagacggagggacagggcaggccaggagtctctgccttcagggagatggctctgggtgcctgctgaggggcagttctgatgtgcagagcctcggaacgaacagcagggaacacggccgctcagaaacaggcaacagtcaggtgaggctgagcagcccaggggtgagcggccctcctgcggggcctcagggccgaacccacttccagtgtgcagagtggacgcaaggccgcctggtgacggaggcgcctgcaggaaactctggaagtgctggagcgaagacgggacctttcacgttcagtgcagcacacggcttaggtcagaggaaggaaaggaaacttgacggttccagaaagaaggagccaagacccggaacggccagggaggcgctgggcatgcgggtttcctgtggcagcagccggggttaaaggcccctgggcacaagaagagaccctgtgcccccacacagggtgaacagatggacctgagacgccacccccacaagcacacaaactgtgggcgccaagggttccatccggagcggctggcggcatcctcctccggccgtggtacctctgggccccctcttttgggtttgaggtccatttacactctctgcgcgctcagagaacttcccgaaatgaagatggtgaaataggaagaattgtcaacaaaagaaaagaacaagactgtgaaaaatagcagacagatcattaaaagccctgcagaacttgcagaaataaggccgggcacagtggctgacgcctgtaatcccagcactttgggaggccgaggcgggaggatcacctgaggtcaggagttgaagaccagcctggccaacatggtgaaaccccgtctccactaaaaataaaataattagctgggtgttttggcacatgcctgtagtcccaggtactcgggaggctgaggcaggagaatcactggagcctgggaggcggagttgagatcctgccactgcaattcaacctgggtgacagagttaaaaaaataaaataagaacttatagaaatagaaaagggcattgaaatgaggaactcggtggtgggttccgcaggaggtagggtcctgtctggaaagatgacgagcaggtggtggctgcagtcgagtaggtgagccagggtgttccgggtggtggggacagagtgagagggagcagctcaggtctgcaggagccgctggagagagaccccggaggcagggggcggctgagcctcggccacaactggggagaaacaaagtcagctttgcctgggactgaaagcagaacagagacgggctctttgggcagccggagagggaggtgggcagaagcacgtgctgcggccccggaggcggcaggcagaggagcggccaccctggagtgcctggcatcagcttgtaggccccgaggaggaggccccccatccctggtggtgggttgagacgagggtgtggattctttttctcaggccgcccgagccatggtaaaggagtacacgctggtgcatagtgggcagcggaaaggtgacccccggcctgcgagggtgggggctgctgcgggctgatggtagctgattttggtgaggcttgcttttttttttttttttttttttttttttggcagaatctggctctgttgcccatgctggagtgcaatggcgccatcccagcccactgcaacctccgcctcccgggttcaagtgattctcctgcctcagcctcccaagtagctgggactacaggcggccgccaccacgcccagctaatttttatatttttagtagagatggggtttcgtcatgttggtcaggctggtctcgaacgcctgacctcaagtgatctgcccacctcggcctcccaaagtgctgggattacaggcatgagcctctacctggcctggtgagggttttcctgccccactcagtgcctgtcaagggacaggagcaagggtttacacagctgagccccggggaggctcagggccaagtctggggactgaagggtcaggcccctcccttggtcccagtagaggtggcaggggggccatctgggagggtggcggacgctggcgatggccagcggcagccggtcattctctgcgtggattgtgaagggaggggtggcacgggccagggctggtcctgggggggtgcctgtggatccctcgggcctcccctcccagctgaggtccccacgttcatcctgtgtccatgtcctgctggccgctcaccttggtgtaacgcaaggtccatgtgtccccaggaagcaggaagagctggtgcagcaggtgcggaagcggctggaggaggcgctgatggccgacatgctggcgcacgtggaggagctggcccgtgacggggaggcgccgctggacaaggcctgcgctgaggacgacgacgaggaagacgaggaggaggaggaggaggagcccgacccggacccggagatggagcacgtctagggcaggtgctgcggggccacgggggctccctggagtcgggtcctggcagtggggactgcctggtgaacacagatgtgcttgggatgacgggtgcctcccaagagcttcccatctccctagaagagcccaagcgtccccgtcccgtggagtcgctaaagccagccctccctgtcctttccagaggccctgccgagagcccgtgctgcctgctggagccgcctgcagacgcggtcctcggccccacgtgaaccaggctcggcggcgaagcccagccttggagacacccaggaggaaggccgtgctcctggctccctcctcggcccgtccccacttcccggggcctcggggcacacagctggggctgcccccacccgaaagaccctccacgctcgtcctctacagagtccggcttcgggaagtgccgggtgctcctgggccctgcctggctccctacgacctttgggctcgaggccagctcctccccatgcccgctgtcccagctccttgagactggagagcagccagcaggtgcccggcagctcggcgccacggcttgctgacagctgggagggtttctcggtctggaggcgtagttttgaaactcacatcacccactgtgcagcgtgaggacgggactctggtctgctgtggggggcatgcaggacggcgccactctctgccctgccatgcggctggtggtgccacagagcctcaccgtgcctgagtggcatgcccaggaggccgctctccttcagtaaatgtaacacagtcgaggcacgtcatcgggcagccttccctgtgtgccaacgccagccttcgcttctgaaaaccaaactccagccgctgccagtcgggacttggtcgcccggcgctgccagaatgctccactgccagccggcccccctgcctcggtttcccttctgtttagtggcgacacaggcacccagctttggggtggtgctgacgctcccaggggtgccaggagccactgggacagggtgaggctcccagacgctcctcgaggtgcccagctctccagggagcttctggcccaaggccgtctgagggatctgctccttaaccccccagtgccttggcgagggcaggttccaagccacagacgcctgccccgagtggactctgcggccagtccctggtgccctcctggccctgctgcccagtgagggctcctacgggtgggttcattggcctgggcccagcgagcccccacctgcattgaccttaggcccatagagagggcctgtcccggtgctgccccagccaggatctggtcgctgccccagggggactgatgggcagagtcgcccctgtggctggactgtgaccatccctgatggggcctgaccgcgggagctgaggaagcgccgctccaccgtctgccctccaaggacccgcatggaggcagtgggctggcagcttcctgctgctccctgtcagagtcaaagcacaaatcctcaggacgggctcaagggccagggcagccgagggaagctccaggtggggaccacgtcttcctgaggttggtgcccactggctgggaccctttgcagtggggtggcctcccctctgtctgcctggtggagggagccgtgggcgtggggacgtgactgaataaagccaccatgggtggatgtgcttggagcctggagttcggtgcgtccgctagactttggtgcccacgtttgagcttctgtctttggttgggtgatgaaaggctgaaagcggtgtggggacagggccagcaggtcccccaacctcgcggacattcacaacccaagagtcaggcttaggggtattcagagaagaccaggccggcctgggcatctgtgggcaagggccgtgccccctgaggtgccgctggctcagcctagggatcgtgggtcttggccctgctgccccggtgaggaagatgggctggggctcagacccagcaccgctccttccaaaggaagggaagcaggaggggctgcctggcagggagggccccccaggtcctcaggtcctgcacagccgctgcagggaggggagctgtgccccgggaccctggacttcagctcactagccatggccactggaagctgctttctggacctgaaggctgggaggccaccctcccctcatctgcccggcactcagagacactctgtttccctcttcccatctcccactgtgtccctgtctcccttggtctctctctgtctctgtctatccctgtctctatctctccctcttgtctctctcttgcgccgtctccctctctgtccctctttgtttcttgctctctctcctgtctctctccctcggtctctgtctctgtctcttgctgtctctccctctctgtcgcagcccagcttcctgtcactgacagaccccgatcagtccctctgatcccggggttctggccatgtcctggccttggtctgagatgtgatgatccctacccctgccacagggccctccccactggaagcccatccaggccctgggctgtcgctgttgacgaagcttgagggtcctttcctctctccctgaaaccttggggacccccacaggccaaggcaatactggcctttgctagaggtcgtgcccggtgagaagtgagttgtaggcgtgggcacctgaggggccagcccagtgctcaggccctcgtcaaattccctgccctggaaaagtctcagaccctcaggctgaaccccctgggcgcaccgaggctccacactccagccccagaacccagacctggcatggggcggggaagcctgagctcccaatgctgggatctttcgtgggggcctcatgaccagcctgccctgtgcggtgcctggccccatcctcaaaggccacttggctgcccccagccccgcccatgtctcagccccaagaccttctgggactttttttttttttagacaagagtttcgctcttctttcgctcttgttgcacaggctggagtgcagtggcgtgatctgggctcactgcaacctccaccttctgggttcaagcctcagcctcccgagtagccaccacgcccagctaatttttgtatttttaatagagacagggtttcaccatgttggccagtctggtctggaactcctaacctcaggtgatccgcccgccccagcttcccaaattgccgggattacaggtgtgaaccaccatggcagcccttctggcacttgccagcagcagcaagagcctcacgtgtcccccgcctcccctcagaccaagctccccaccgctgccgccacagagggtaccagggaggagaggctcaggacccccgtggcgaggatgcacctcccagccctcggcccagccacacggaccacagggctcccgagtctcagcaacaccagctaaggggcatcatgcctctcctgccacacccagggcccgtgccttgctgtccctgcagcccccagacccaggcagacagggacagcccttctgaccaccgcacacactcgccaccgcaaagatccccggggatgcccctcgcctgtgtgtgtccctcatggctgtcacagcaaatctccaggagcccggaggtgcccatggaaaacacccccagcttccggaacgttctttcggacagggccataccggagcaagactcagctttctggtagcgggtggctgggcactgcctgtgagattctgtcacactcgctccagattcaaggggtccaaaaagtgtaaacaagtcaagtgcccatccagggatgaacgaacacagcccggcccggccacaccatggagcaggactcggccatgaacaggaaccaggctctgacaccggccacggcgcagatgcccctggaggagtccaccctcagcaagagacacacagacaccgacacggcgtgcaatcccatttgtgtgaatgtccaggacaggccgattcagagacaggaaggggacacgtgggtgccagtgactggggattatggggactgggggaaatggctaaagggcacccacaaaagttaatgataatgttccacagttttttttttgagatggagtctcactcttgtcacccaggctggagtgcaatggtgtgatctctgctcactgcaagctctgcctcctgggttcacgccattctccctcctcagcctcccaagtagctgagattacaggcatatgccaccacccccagtagagacggggtttcaccatgttagccaggctggtcacgaactcctgacctcaagtgatcccccacctcggcctcccaaagtgctgggattacaggcatgagccaccgtgcctcaccagaattgtgtacttttttttcttcttcttcttcggcatggagtttcgctcttgttgcccaggctggagtgcaatggtgcaaacttggctcaccgcaacctcctcctcccgggttcaatagattctccagcctcagcctgctgagtagctgagattacgggcgcccgccaccacacccagctaatctttgtacttttagtagagacagggtttcaccatgttggccacgggcaaaagaattttgttgagggcaaataatatgagaccacaaaactgccttccctgctcagttttaattttcacagttttaatttttagccttctctggttaccaaaataaccacgctcacggccgttcatttgaagatatttccagttaacgtgtgtgaagtgggttttttgagatgtaatttacaagcaataaaatgctcctgtctctgctgtcctgcctgccttccttctccatcacaggattctccctgtgcattttccttttcctttctgagttttgttttgttttgttttgttttttgagatggggtttccctcttgtcgccaggctggaatgcaatggtgcgatcttggctcactgcaatctctgcctccccagttcaggcaattctgtctcagcctcccaagtagctgggattacaggcatgtgccaccacgcccggctaattttttgtatttttagtagagacggggttttgccatgttggccaggctagtctcgaactcctgacctcaggtgatccactgatctgcccccaccttggcccctcaaagtgctgggattacaagcgtgagccactgcacctggccttttttttttttttctttgttttgaagcaggatttcactctgtcacctaggctggagtgcagtggcgtaatctcagctcactgcaacctctgcctcccgggctcaagcaatcctcccactttagactcccaagtagctgggaccataggtgtgtgccatcagacccggctaatttttaaattttttgtacaggctgggcaaggtgggacacgcctgtaatcttagcactttgcagggcctaggcagacagatcacttgaggtcaggagtttgagaccagtgtggccaacacgtactagaaagcacgaaaattagctgggcatggtggtaggtgcctgtagtcccagctagtcgtgaggctgaggcaggagaatcccttgagccagggaggaagaggttgcagtgagctgagatcacgccgctgcactccagcctgggcgacagagtgaagggattctgtcttcaaaaaaataataataataaataggccagacacggtggctaacgcctgtaatcccaacactttgggaggcctaggcaggaggatcacctggggtcgggagtttgagactagcctgaccaacacggagaaaccccttctctactaaaaatacaacattagccaggcgtggtgggcacctgtaatcccagctactcaggaggctgaggcaggagcatctcttgaacctgagaggcggagtttacagtgagccaagatggcgccattgcactccatcctgagtgacagagcaagactccgttctcaaaaacacaaaacaaacaaaaaaaaactgtatcctaagcaagacaatggatcccccaggcccacccctgggcttcatcagtgatgatcacggctcctcttgtctcccataacccccaccctgcccggtcaaaatgcctcccttcctatgtgattttcttccaacattctcccatgaaaaaatgtcagacgcggccgggcgtggtggctcatggctgtaatcccagcactttgggaggccaaggcgggcggatcacctgaggtcacgagttcaagaccagcctgaccgtcatggtgaaaccccgtctctactaaaaatacaaaaattagctggacttgttggcggatgcctgtagttccagctactcaggaggctgaggcaggagaatcgctttaacccaggaggcggagcttgcagtgagctgggattgtgccactgcactgcagcctgggcaacagagctagactccgtctcaaaaaaaaaagaaaagaaaagaaaagaaaaagtaaaaaacatcagatgcagagtgggcctgagagaatttcacatttcacggtgaccacaatagtgccaccacctacaccagcgcttcccacctgaggtgactctgggcccaggggccacgtttgtgggcatctgggctgtcacaaccaaggaggtatattatgggttgaatcatgtccgcacaaagatgtctgtgtcctcaaccccacaacttctgaatgggaccttgtttggaaagagggtctctgcagacaagttaagccaaagttgtacgggagggggtggactctcatcccgtgactcctgttcccatgagaagagggaaaccaggacacatacagggagacatgggtgtgtgaagacagaggccgaggtcagagcgatgcggccacaatgagcgatgaggccacaatgagcgatgaggccacaatgagcgatgaggcccagagcccccagaagatggaagaggcagaaaggacgctccccagagcctttgaagggggcgcggccctgcgcacaccttgagttttgactctgaggctccaaaactgggaaagaattaaatattcattgcttcattcattcataaattcatttgtttattagacacagggttttttctttgtttgtttgtttgtttttgagacagagtcttgctctgttgcccaggctggagtgcagtggtgtgatctcaacttgctgcaacctccacctcccgggttcaagcgattctcctgcctcagcctcccaagcagctggcactacaggctcacgccaccacacccggctcatttcatatttttagtagagacagggtttcaccgtgttggccaggttgatatagaactcctaacctaaggtgatctacctgccttggacttccaaagtgctgggaagacaggcgtgagccaccgcgcccggcgcccggctgacaatgccattaataattgcaagtggctgggcatagtgttacccacctgtagtcccagcagtttgggaggctgaggcaggaggattgcttgaggttaggagttcaagactagcccgggcaacaaaaaggaccctgtctctacaaatacaaaaagtagcccggtgtggtggtgcacacctgtggtcccagctactcaggaggctgaggcgggaggattgcttgagctcgggagttctgagctgtagtgagctatgctgatccagcgtctacattaatatgatgacctccctggactgggaggaccaccaggttgcctaaggagggctgaacctacccaagtcagagacggagctggtcaaagctctcatgctgatctgtcctggggtcacacctgtgaatagccactgcaccccagcctgggcaacagagcaagactctgtccgaaaaagaaagaaaaggaaaggagaggagaggggaggggagcagagaaggaagggagaatcctggttgatacggtgaaaccctgtctctacaaaaaatacaaaaaattagctgggtgtggcgtcaggcacctgtagtcccagccactcgggaggctgagacaggagaatggcgtgaacccagaggcggagcttgcagtgagccaagactgcaccactgcactccaacctgggtgacagagcgagactccgtctaaaaaaaaaaaaagaaagaaagaaggaaggaaggaaggaagggagagaaaagaagaaatgaagaacgaaataaaggatgaaagaaaaggaaggaagcaaggaaggaaggagaagaaagaaaagaaagaaggaaagaaagacagaaaaaagaaaaggaagagaaagaaaaaaaggaaagaaagaaaaggaaaagaaaaaagagaaagaaaggaaagagaaagaaagaaaaagaaaagaaagaaaggaagaaagaaagaaaaaaaggaaagaaagagaaaaaaagaaagagagaaagaaagagagatagaaaaacaattccaagcatgggcgtgcacgaaagagaagtccaggaccccaggaggggaagtggggctggatgcagcctggggtcaggagagagattttgggtggggaagggctccaggcagggggatcctgaccctgcctgcctggaagaagtgggcagagaagccaccaaaagtgaagggcccagcagtgggtggctgtggctgagggactagaagagtggctgagggggacccagggtgtgtgaggcggggggaggggacagaggagaagccttgctaggcaaaggggcaggctgccccactcctgcccagagagccctgccttcggtccaagtttgcacagccagccagggacaggtctggtagaagaggggggcaggtagacccagccagacaggtttatcacaaaaaaccccacaggtgcaaggaaggccccgaaggacagctggaggaagagccgctgggaaagcggctattttttttttttttttttttttttgagaggagtcttgctctgtcaaccaggctggagtgcagtggtgcaatctcgactcactgcaaccaccacctccagggttcaagcaattatcctgcctcagcttcctgagtagctgggattacaggtgcgcgccaccacgcctggctaatttttgtatttttagtagagtcgggggtttcaccatgttggccaggctggtctctaactcctgacctcgtgatccacccgcctcggcctcccaaactgctgggatgacaggcatgagccaccgcgcccggcaagggtggctttagaggtggacaacgcccgttgcggggaaaggcaccccagaagagggtggggctccacatggagggttctggctggtgtgagcctgccctcgccatggaagcaccactgtggtagagaggtctctggctgggggcacagagaccgggtctgtggccttgggtggggcggaggaggtggcgtggaggaggtggcctgatcccaaagccgggagccagccagaggggagctaggagagactaggggagagggacctcaggccctggggtgtgcatgattgtggagctgtccctggcacagaggctgggggtggggcaggggcctgaccctaaagcccacctgatagcaaggggtacttggggactgggaccccaggccctggggggtgcaccgtggggcgggggttggaccctggcacagaggcggtgggcgggcaggagcctgacttcgaagtccagtgggatcgcgagggggacttggagaggaccccacgcctttatgcagggaggtgggggtccctggcacaaggaagcgggcgtggagcaagagacctcgcttgggggcgacccggatctctaggggaaattggggagcgggacctcgggccctggggcgcgcgaggcagggactctcaggcttggggagggagcgctgtccaggcaggggctgagccgcacacacctgcagcagcgcccgcacgtgcggatgcgcccgggttcccgcccgagcgccgggcggaggcggggcctggaccacgtgcccggcgccggccccgccccggccccgccccgcgcgcctgcgccctgggggccgcccattgttgggccgcggcgtgacgtcgcgggggcggggccggggcggggccgcgggaggcggcgggagggaaggagcgtcccgcgccgccgccgccgcctcggccgccgaggagccgccgccgccgtcgccgccgccgccgagccgcagccagagtcgctgccgccgcccggcccggcccggcccggccccgagcagccccgcgccgccgccgccccgcccgcccggccccccgtgcccgcccccgccgctggatgcaggcggccggcggcccagctcgcagaggcggagggcggcgcgggcggcggcggcggcgcgggcggcaggagcgcgggccccagcgctagctcccgccatgcccagctcgctcggccagcccgacggcggcgggggcgggggcggcggcggcggcggcgtgggggcggcgggggaggaccccggacccggacctgcgcccccgcccgagggcgcccaggaggccgcgcccgcgccccggccgccgcccgaacccgacgacgcggccgccgcgctccgcctggcgctggaccagctgtcggcgctcgggctggggggcgctggcgacacggacgaggagggggcggccggggacggcgcagcggcggcggggggcgcggacggcggggcggctccggagcctgtgccccccgacggacctgaggccggcgcgcccccgaccctggcccccgccgtggcccccgggtcgctgccgctgctggaccccaacgcgagtcccccgccgccgccgccgccccggccgtcgccccccgacgtgttcgcgggcttcgcgccccaccccgcggccctggggcccccgacgctgctggccgaccagatgagcgtgatcggcagccgcaagaaaagcgtcaacatgaccgagtgcgtcccggtgcccagctccgagcacgtcgccgagatcgtgggtcgccagggtgagtggccctcgtcgggggttgctgtcctgggggtccccgcaccgtccgccccggggaagggggtcgcccgagcccagcccagcccgcgccggacgccccgcaccggacacgccccgcgtgggctccggcctcggccgctgcctttgcgcctttgtcctgcagccgccgcgggagaaagttgggcgcagcccgcgctcctcccctgcgcgctccggccccgccgccgcctttgtctgggccgcctccagcccggaaaggctccggggagccgcgccgcagcccaggccctcggccgcccgcaggggcaccccagagaggggctcgagggcccggggctccggccgggcggggggcgccccacacccagcacaggcggcggggcggggcaagcgcaggtttaggggtggcttaggggggccgcctgcaggaccgggagagaaggctgacagtacaaagagcgcacgtctcagtctccagcctggggccctgactggggtggggacgggaccgggcaggagagggtccctgctccactctctggccccgagtcagggatttcggggcctggggaaggaccggctgtcaaagccacttctggggtgcagcctgctgggcaggccggcgggcggcaggccccgggtgtggggtccagcggtggcatcgtcggagcttccctctggccgccccattgttctctttgttagagagcgaggctgagatttgcagggtgacatcaggccggccgctgctcattggcccccgagctgcggggcgggcgggcgggtggtgg

SEQ ID NO: 2571 - DNA, 2820 bp, Homo sapiens
cgcgcacgcgcaccaggcggccggcagagacagggcacagtaaaaggagccgcgcggactccgggcacagctgctgggcactggcagctcgcaaggcacagcgcgcaggcgcgcacgccacttaaggccccgccccctcccagcgcgctgattggcggggccgtagaggggcgggggcatggcgccgcggctgcgcagcgcggggccccgcgcgggcgggtgggcggagcgggccccccgagcgggggctggcgagcgcggggagggggccgaaagggcggcaaagccggcgcgcgcccggctgggggcggagggcgggggcccgcgggccggaacagccgcggcaagtggcggcggcggcagcggcagcggaggcagctgaggcggcggcggcgagtgggggtccgggcggcggcggcgggcccggcggcgggccgaggagccgggcgcaatggagcggaagaggtgggagtgcccggcgctcccgcagggctgggagagggaagaagtgcccagaaggtcggggctgtcggccggccacagggatgtcttttactatagcccgagcgggaagaagttccgcagcaagccgcagctggcgcgctacctgggcggctccatggacctgagcaccttcgacttccgcacgggcaagatgctgatgagcaagatgaacaagagccgccagcgcgtgcgctacgactcctccaaccaggtcaagggcaagcccgacctgaacacggcgctgcccgtgcgccagacggcgtccatcttcaagcagccggtgaccaagattaccaaccaccccagcaacaaggtcaagagcgacccgcagaaggcggtggaccagccgcgccagctcttctgggagaagaagctgagcggcctgaacgccttcgacattgctgaggagctggtcaagaccatggacctccccaagggcctgcagggggtgggacctggctgcacggatgagacgctgctgtcggccatcgccagcgccctgcacactagcaccatgcccatcacgggacagctctcggccgccgtggagaagaaccccggcgtatggctcaacaccacgcagcccctgtgcaaagccttcatggtgaccgacgaggacatcaggaagcaggaagagctggtgcagcaggtgcggaagcggctggaggaggcgctgatggccgacatgctggcgcacgtggaggagctggcccgtgacggggaggcgccgctggacaaggcctgcgctgaggacgacgacgaggaagacgaggaggaggaggaggaggagcccgacccggacccggagatggagcacgtctagggcagaggccctgccgagagcccgtgctgcctgctggagccgcctgcagacgcggtcctcggccccacgtgaaccaggctcggcggcgaagcccagccttggagacacccaggaggaaggccgtgctcctggctccctcctcggcccgtccccacttcccggggcctcggggcacacagctggggctgcccccacccgaaagaccctccacgctcgtcctctacagagtccggcttcgggaagtgccgggtgctcctgggccctgcctggctccctacgacctttgggctcgaggccagctcctccccatgcccgctgtcccagctccttgagactggagagcagccagcaggtgcccggcagctcggcgccacggcttgctgacagctgggagggtttctcggtctggaggcgtagttttgaaactcacatcacccactgtgcagcgtgaggacgggactctggtctgctgtggggggcatgcaggacggcgccactctctgccctgccatgcggctggtggtgccacagagcctcaccgtgcctgagtggcatgcccaggaggccgctctccttcagtaaatgtaacacagtcgaggcacgtcatcgggcagccttccctgtgtgccaacgccagccttcgcttctgaaaaccaaactccagccgctgccagtcgggacttggtcgcccggcgctgccagaatgctccactgccagccggcccccctgcctcggtttcccttctgtttagtggcgacacaggcacccagctttggggtggtgctgacgctcccaggggtgccaggagccactgggacagggtgaggctcccagacgctcctcgaggtgcccagctctccagggagcttctggcccaaggccgtctgagggatctgctccttaaccccccagtgccttggcgagggcaggttccaagccacagacgcctgccccgagtggactctgcggccagtccctggtgccctcctggccctgctgcccagtgagggctcctacgggtgggttcattggcctgggcccagcgagcccccacctgcattgaccttaggcccatagagagggcctgtcccggtgctgccccagccaggatctggtcgctgccccagggggactgatgggcagagtcgcccctgtggctggactgtgaccatccctgatggggcctgaccgcgggagctgaggaagcgccgctccaccgtctgccctccaaggacccgcatggaggcagtgggctggcagcttcctgctgctccctgtcagagtcaaagcacaaatcctcaggacgggctcaagggccagggcagccgagggaagctccaggtggggaccacgtcttcctgaggttggtgcccactggctgggaccctttgcagtggggtggcctcccctctgtctgcctggtggagggagccgtgggcgtggggacgtgactgaataaagccaccatgggtggatgtgcttggagcctgga

SEQ ID NO: 2572 - protein, 289 aa, Homo sapiens
MERKRWECPALPQGWEREEVPRRSGLSAGHRDVFYYSPSGKKFRSKPQLARYLGGSMDLSTFDFRTGKMLMSKMNKSRQRVRYDSSNQVKGKPDLNTALPVRQTASIFKQPVTKITNHPSNKVKSDPQKAVDQPRQLFWEKKLSQAFDIAEELVKTMDLPKGLQGVGPGCTDETLLSAIASALHTSTMPITGQLSAAVEKNPGVWLNTTQPLCKAFMVTDEDIRKQEELVQQVRKRLEEALMADMLAHVEELARDGEAPLDKACAEDDDEEDEEEEEEEPDPDPEMEHV

SEQ ID NO: 2573 - DNA, 2995 bp, Homo sapiens
cgcgcacgcgcaccaggcggccggcagagacagggcacagtaaaaggagccgcgcggactccgggcacagctgctgggcactggcagctcgcaaggcacagcgcgcaggcgcgcacgccacttaaggccccgccccctcccagcgcgctgattggcggggccgtagaggggcgggggcatggcgccgcggctgcgcagcgcggggccccgcgcgggcgggtgggcggagcgggccccccgagcgggggctggcgagcgcggggagggggccgaaagggcggcaaagccggcgcgcgcccggctgggggcggagggcgggggcccgcgggccggaacagccgcggcaagtggcggcggcggcagcggcagcggaggcagctgaggcggcggcggcgagtgggggtccgggcggcggcggcgggcccggcggcgggccgaggagccgggcgcaatggagcggaagaggtgggagtgcccggcgctcccgcagggctgggagagggaagaagtgcccagaaggtcggggctgtcggccggccacagggatgtcttttactatagcccgagcgggaagaagttccgcagcaagccgcagctggcgcgctacctgggcggctccatggacctgagcaccttcgacttccgcacgggcaagatgctgatgagcaagatgaacaagagccgccagcgcgtgcgctacgactcctccaaccaggtcaagggcaagcccgacctgaacacggcgctgcccgtgcgccagacggcgtccatcttcaagcagccggtgaccaagattaccaaccaccccagcaacaaggtcaagagcgacccgcagaaggcggtggaccagccgcgccagctcttctgggagaagaagctgagcggcctgaacgccttcgacattgctgaggagctggtcaagaccatggacctccccaagggcctgcagggggtgggacctggctgcacggatgagacgctgctgtcggccatcgccagcgccctgcacactagcaccatgcccatcacgggacagctctcggccgccgtggagaagaaccccggcgtatggctcaacaccacgcagcccctgtgcaaagccttcatggtgaccgacgaggacatcaggaagcaggaagagctggtgcagcaggtgcggaagcggctggaggaggcgctgatggccgacatgctggcgcacgtggaggagctggcccgtgacggggaggcgccgctggacaaggcctgcgctgaggacgacgacgaggaagacgaggaggaggaggaggaggagcccgacccggacccggagatggagcacgtctagggcaggtgctgcggggccacgggggctccctggagtcgggtcctggcagtggggactgcctggtgaacacagatgtgcttgggatgacgggtgcctcccaagagcttcccatctccctagaagagcccaagcgtccccgtcccgtggagtcgctaaagccagccctccctgtcctttccagaggccctgccgagagcccgtgctgcctgctggagccgcctgcagacgcggtcctcggccccacgtgaaccaggctcggcggcgaagcccagccttggagacacccaggaggaaggccgtgctcctggctccctcctcggcccgtccccacttcccggggcctcggggcacacagctggggctgcccccacccgaaagaccctccacgctcgtcctctacagagtccggcttcgggaagtgccgggtgctcctgggccctgcctggctccctacgacctttgggctcgaggccagctcctccccatgcccgctgtcccagctccttgagactggagagcagccagcaggtgcccggcagctcggcgccacggcttgctgacagctgggagggtttctcggtctggaggcgtagttttgaaactcacatcacccactgtgcagcgtgaggacgggactctggtctgctgtggggggcatgcaggacggcgccactctctgccctgccatgcggctggtggtgccacagagcctcaccgtgcctgagtggcatgcccaggaggccgctctccttcagtaaatgtaacacagtcgaggcacgtcatcgggcagccttccctgtgtgccaacgccagccttcgcttctgaaaaccaaactccagccgctgccagtcgggacttggtcgcccggcgctgccagaatgctccactgccagccggcccccctgcctcggtttcccttctgtttagtggcgacacaggcacccagctttggggtggtgctgacgctcccaggggtgccaggagccactgggacagggtgaggctcccagacgctcctcgaggtgcccagctctccagggagcttctggcccaaggccgtctgagggatctgctccttaaccccccagtgccttggcgagggcaggttccaagccacagacgcctgccccgagtggactctgcggccagtccctggtgccctcctggccctgctgcccagtgagggctcctacgggtgggttcattggcctgggcccagcgagcccccacctgcattgaccttaggcccatagagagggcctgtcccggtgctgccccagccaggatctggtcgctgccccagggggactgatgggcagagtcgcccctgtggctggactgtgaccatccctgatggggcctgaccgcgggagctgaggaagcgccgctccaccgtctgccctccaaggacccgcatggaggcagtgggctggcagcttcctgctgctccctgtcagagtcaaagcacaaatcctcaggacgggctcaagggccagggcagccgagggaagctccaggtggggaccacgtcttcctgaggttggtgcccactggctgggaccctttgcagtggggtggcctcccctctgtctgcctggtggagggagccgtgggcgtggggacgtgactgaataaagccaccatgggtggatgtgcttggagcctgg

SEQ ID NO: 2574 - protein, 289 aa, Homo sapiens; identical to SEQ ID NO: 2572

SEQ ID NO: 2575 - DNA, 2319 bp, Homo sapiens
cgggtgggcggagcgggccccccgagcgggggctggcgagcgcggggagggggccgaaagggcggcaaagccggcgcgcgcccggctgggggcggagggcgggggcccgcgggccggaacagccgcggcaagtggcggcggcggcagcggcagcggaggcagctgaggcggcggcggcgagtgggggtccgggcggcggcggcgggcccggcggcgggccgaggagccgggcgcaatggagcggaagaggtgggagtgcccggcgctcccgcagggctgggagagggaagaagtgcccagaaggtcggggctgtcggccggccacagggatgtcttttactatagcccgagcgggaagaagttccgcagcaagccgcagctggcgcgctacctgggcggctccatggacctgagcaccttcgacttccgcacgggcaagatgctgatgagcaagatgaacaagagccgccagcgcgtgcgctacgactcctccaaccaggtcaagggcaagcccgacctgaacacggcgctgcccgtgcgccagacggcgtccatcttcaagcagccggtgaccaagattaccaaccaccccagcaacaaggtcaagagcgacccgcagaaggcggtggaccagccgcgccagctcttctgggagaagaagctgagcggcctgaacgccttcgacattgctgaggagctggtcaagaccatggacctccccaagggcctgcagggggtgggacctggctgcacggatgagacgctgctgtcggccatcgccagcgccctgcacactagcaccatgcccatcacgggacagctctcggccgccgtggagaagaaccccggcgtatggctcaacaccacgcagcccctgtgcaaagccttcatggtgaccgacgaggacatcaggaagcaggaagagctggtgcagcaggtgcggaagcggctggaggaggcgctgatggccgacatgctggcgcacgtggaggagctggcccgtgacggggaggcgccgctggacaaggcctgcgctgaggacgacgacgaggaagacgaggaggaggaggaggaggagcccgacccggacccggagatggagcacgtctagggcagaggccctgccgagagcccgtgctgcctgctggagccgcctgcagacgcggtcctcggccccacgtgaaccaggctcggcggcgaagcccagccttggagacacccaggaggaaggccgtgctcctggctccctcctcggcccgtccccacttcccggggcctcggggcacacagctggggctgcccccacccgaaagaccctccacgctcgtcctctacagagtccggcttcgggaagtgccgggtgctcctgggccctgcctggctccctacgacctttgggctcgaggccagctcctccccatgcccgctgtcccagctccttgagactggagagcagccagcaggtgcccggcagctcggcgccacggcttgctgacagctgggagggtttctcggtctggaggcgtagttttgaaactcacatcacccactgtgcagcgtgaggacgggactctggtctgctgtggggggcatgcaggacggcgccactctctgccctgccatgcggctggtggtgccacagagcctcaccgtgcctgagtggcatgcccaggaggccgctctccttcagtaaatgtaacacagtcgaggcacgtcatcgggcagccttccctgtgtgccaacgccagccttcgcttctgaaaaccaaactccagccgctgccagtcgggacttggtcgcccggcgctgccagaatgctccactgccagccggcccccctgcctcggtttcccttctgtttagtggcgacacaggcacccagctttggggtggtgctgacgctcccaggggtgccaggagccactgggacagggtgaggctcccagacgctcctcgaggtgcccagctctccagggagcttctggcccaaggccgtctgagggatctgctcctacgggtgggttcattggcctgggcccagcgagcccccaccgtctgccctccaaggacccgcatggaggcagtgggctggcagcttcctgctgctccctgtcagagtcaaagcacaaatcctcaggacgggctcaagggccagggcagccgagggaagctccaggtggggaccacgtcttcctgaggttggtgcccactggctgggaccctttgcagtggggtggcctcccctctgtctgcctggtggagggagccgtgggcgtggggacgtgactgaataaagccaccatgggtggatgtgcttgg

SEQ ID NO: 2576 - protein, 289 aa, Homo sapiens; identical to SEQ ID NO: 2572

SEQ ID NO: 2577 - DNA, 2698 bp, Homo sapiens
agtgctctgggtctggctggcgcccagatctaggggccagttgtggggtgctggggtctgggatgaaggtctggggtcacgccagggttggggtctggggctggggccagggcctgcctgggtttggggtcagggccgtgttggggtctggggctggggtcgcgacctgaagctggggctgggactgggtttgggtctgcggccgaggcctgggtttggggtctggggtccgcccggggcgccgaccgtcccgcctccccgcagcccgagcgggaagaagttccgcagcaagccgcagctggcgcgctacctgggcggctccatggacctgagcaccttcgacttccgcacgggcaagatgctgatgagcaagatgaacaagagccgccagcgcgtgcgctacgactcctccaaccaggtcaagggcaagcccgacctgaacacggcgctgcccgtgcgccagacggcgtccatcttcaagcagccggtgaccaagattaccaaccaccccagcaacaaggtcaagagcgacccgcagaaggcggtggaccagccgcgccagctcttctgggagaagaagctgagcggcctgaacgccttcgacattgctgaggagctggtcaagaccatggacctccccaagggcctgcagggggtgggacctggctgcacggatgagacgctgctgtcggccatcgccagcgccctgcacactagcaccatgcccatcacgggacagctctcggccgccgtggagaagaaccccggcgtatggctcaacaccacgcagcccctgtgcaaagccttcatggtgaccgacgaggacatcaggaagcaggaagagctggtgcagcaggtgcggaagcggctggaggaggcgctgatggccgacatgctggcgcacgtggaggagctggcccgtgacggggaggcgccgctggacaaggcctgcgctgaggacgacgacgaggaagacgaggaggaggaggaggaggagcccgacccggacccggagatggagcacgtctagggcaggtgctgcggggccacgggggctccctggagtcgggtcctggcagtggggactgcctggtgaacacagatgtgcttgggatgacgggtgcctcccaagagcttcccatctccctagaagagcccaagcgtccccgtcccgtggagtcgctaaagccagccctccctgtcctttccagaggccctgccgagagcccgtgctgcctgctggagccgcctgcagacgcggtcctcggccccacgtgaaccaggctcggcggcgaagcccagccttggagacacccaggaggaaggccgtgctcctggctccctcctcggcccgtccccacttcccggggcctcggggcacacagctggggctgcccccacccgaaagaccctccacgctcgtcctctacagagtccggcttcgggaagtgccgggtgctcctgggccctgcctggctccctacgacctttgggctcgaggccagctcctccccatgcccgctgtcccagctccttgagactggagagcagccagcaggtgcccggcagctcggcgccacggcttgctgacagctgggagggtttctcggtctggaggcgtagttttgaaactcacatcacccactgtgcagcgtgaggacgggactctggtctgctgtggggggcatgcaggacggcgccactctctgccctgccatgcggctggtggtgccacagagcctcaccgtgcctgagtggcatgcccaggaggccgctctccttcagtaaatgtaacacagtcgaggcacgtcatcgggcagccttccctgtgtgccaacgccagccttcgcttctgaaaaccaaactccagccgctgccagtcgggacttggtcgcccggcgctgccagaatgctccactgccagccggcccccctgcctcggtttcccttctgtttagtggcgacacaggcacccagctttggggtggtgctgacgctcccaggggtgccaggagccactgggacagggtgaggctcccagacgctcctcgaggtgcccagctctccagggagcttctggcccaaggccgtctgagggatctgctccttaaccccccagtgccttggcgagggcaggttccaagccacagacgcctgccccgagtggactctgcggccagtccctggtgccctcctggccctgctgcccagtgagggctcctacgggtgggttcattggcctgggcccagcgagcccccacctgcattgaccttaggcccatagagagggcctgtcccggtgctgccccagccaggatctggtcgctgccccagggggactgatgggcagagtcgcccctgtggctggactgtgaccatccctgatggggcctgaccgcgggagctgaggaagcgccgctccaccgtctgccctccaaggacccgcatggaggcagtgggctggcagcttcctgctgctccctgtcagagtcaaagcacaaatcctcaggacgggctcaagggccagggcagccgagggaagctccaggtggggaccacgtcttcctgaggttggtgcccactggctgggaccctttgcagtggggtggcctcccctctgtctgcctggtggagggagccgtgggcgtggggacgtgactgaataaagccaccatgggtggatgtgcttggagcctgg

SEQ ID NO: 2578 - protein, 233 aa, Homo sapiens
MDLSTFDFRTGKMLMSKMNKSRQRVRYDSSNQVKGKPDLNTALPVRQTASIFKQPVTKITNHPSNKVKSDPQKAVDQPRQLFWEKKLSQAFDIAEELVKTMDLPKGLQGVGPGCTDETLLSAIASALHTSTMPITGQLSAAVEKNPGVWLNTTQPLCKAFMVTDEDIRKQEELVQQVRKRLEEALMADMLAHVEELARDGEAPLDKACAEDDDEEDEEEEEEEPDPDPEMEHV

SEQ ID NO: 2579 - DNA, 36725 bp, Mus musculus
cgtggtggcacacgcctttaatcccagcactcgggaggcagaggcaggcggatttctgagttcgaggccaccctggtctacagagtgagttccaggacagccagggctacacagagaaaccctgtcttgaaaaaccaaaaaaacacaaaaacaaaagaggtagctgcagtcctcatgctttagcctctgaaagggatatagtacctccagtgcagtttctaagcagtgcaccacaacaccatctcattccagaaccttccatcacccaggtcatctcacatttacttgctgtctctagatgttcctgttctagacagttcctgacagggagtctcacactcagtggtctctaacgtctggctctcagtgagagcctctcttgctctttatttacttacttacttacttttaaagatttatttattttatgtacttgagtacactgtagctgtcttcagacacacctgaagagggtattggatcccattacagatggttgtgagccaccgtgtggttgctgggaattaaactcaggacctctggaagagtggctcttaactgctgagccatctctccagccccttattttgtctttttaaagttgactttggttgtgtgtggtgtaggatctgaggtcctcgtgattcaacagcaagcactcttaaccacaaagccatcaaccttcgccccaagccccacgttgaagtctccatgtgtgctttgttggagcctggctcctactcgtggccatgtgttgttgctccagtgtgggactgggcctcgtgtctgtcagccagccagccataatgctagtccatttgcccctggatgatacaaatataggcacactgctgagtgtttcttcctcgtggtgtggccaatagggctatccttcctgtgcagtgacagtcttgctgatctgtgctgtgcaatcttcttcactctgctcctgccactcatctgtcagccccaaggttctagtgtctgccagggctggcctcctccagccgtggagacttgtgcaattcctggttttactgtcctatctgctcccctgaggacctcaccatgtagtgtgaggggagacaatgattaaagggtgcctctgtgggagacatggggcctcagctcagactctgcttcagaaatcatcccggcacaagaagaagaaacacagaaaggagaaggagaaggaggagaggccacgagacaagaagaaagctaagaagaagcaggtggcacctctggagaatggtgcggcagcagaggaggaggaggagcctatcccggtgagcattcttgacaacctgccaacccaagggtgtcacctgggttctgtttggagaggacccaggggtccgtgcaagctgctttgtgacctgtgcttggtgagggatccatgacccgcaacatctggtggctcatgttttgggaactggccatccccaagcatggttctgtagcctagtccctgtcgcccacaactgacgagcctgtctctcctccccagcccatgtccagctactgccttctggctgagagtccctacattaaagtggtaagtgacacttgggttgctgcagggcgggccattggcggagcagacccatccttagaagccttgtggggctggcggcagtagccgggcaccaagctcaagcatcagtatagggcactctctgcagcccagccacagctggagagccagtatgaccaggccaccagaggacagctttgctagcaagacagagcgaccagctgggcagcatacaccttacaccttgggaagaggcagggggattgcaagatcaaggccaaccagtgctgcactacaagactttgtctcaaggagtcaaaaagacaggaactggggtgcagcttcatgaagagtgcgttttgagggcctggggcccacaggcagttttcacgggggtggggtggggtcactgtccttgatcttggcagtgaactccctcccctcagctggtccctggcccttgaccctgcccttgctcatgcagacatatgacatccaagccagcttacagaaggacagccaagtgactgtgtccatcatcctggagaaccagagcagcagcttcctgaagaacatggagctcaacgtgctggactctctcaacaccaagatgaccaggccagagggctcatcggtacacgacggtgtgcccgtgcctttccaactgcctcccggtgagcctacccttcggccctagccttcgtcacgccaccttggctcttcacaatggacttaactagagctcccagggacagctgaagcgaaaggccccaagctcttgatgaccctcccgtgtctcggtgctactcttgggccacatgctggcttccacctgggccattgggctgagctgcagcagtgcccattgtttctgtcactctagcatcccacccagctaggacagacaccccagggtcagtgctggcccactgagtgccatgtctcccagcaggcgtctccaatgaggcccagtttgtgttcaccattcagagcatcgtcatggcccagaagctcaaaggcacactgtccttcattgccaaggtatgcactctatgctgaggtccaggtccctcccgctccccaggggatgtcaggcatcccaggaaagaaagtgcctgattggaaagtccaccctacagcctttctccttgcaggatgatgaaggagccacccatgagaagttggacttccggctgcatttcagctgtagctcgtacctgatcaccacaccctgctacaggtgtgtctccaccccaccacacagctcgtgggaggaaaggaggggtagagtttgctgatgtgggctgtgaggtaggagtaacatgagagtgctcagccttcatcacaggcgtcgcctccacctgaggccacctcttctggcaggtgacactgcagatggttgcctctctgtcccggaggactaccctgtgtgcctgtcactttctgatgctcacatgtaggtagcccaggctgccttggagtttgaagctgccctcatgccgcgacattcctaatgccaggtgactgctgacacccaggccctgccatcacacactctctgtcctcccacagcgatgcctttgcaaagttgctagagtcaggagacctgagcatgaactccatcaaagtcgatggcattagtatgtctttccagaatcttctggcaaagatctgcttctaccaccatttttccggtaagcaatgttacagtgataacactcttggtggctttgtaccaaaaatgacagaagctactttcccacccctaattagacccttgctgcatcaggcctgggcctgcagcctgagtgccttcacagcatgggccccagccgtgtcctggcagttctggctggagagggcctgccagggagcatggacctgacccccctgtctgttgcagttgtggagcgagtagactcctgtgcctccatgtacagccgctctatccagggccaccatgtctgcctgctggtgaagaaggtgagctcacagcagtgcctgctgctctgcagccacccaggatgctctcaacaagaggctgagtttcccctgcacatacctccctgtccagggctgtcctctaaggtccccatcccaagagtacaacccatctcccacagttagacgagacctcctagctgagctgtaccaaccctcacagttctaccaggccctccagatgcatctggtttgggaacacaaggcaagaggaagggaagagtgggctcagaactgtctccggcgccctgaagggctgtatgctatttacctgccatcttagcactcaggagacagaggcagggttactgcattccaggcaagttggggctacatagcttcaaaaaaataaagtgaggtctaggctccagggagggtaggagaggtgacatttgcgccccccacacacacacacacacacaaacataggcaatttgtgcatgtgccatcccctagggcgagagctccgtgtcagtagatgggaagtgcagcgatgccacgttgctcagcagcctgctggaggaaatgaagaccacgttggctcagtgctgagttgcagtccaggatgtgcaacagaccacagaaagatgtgatgcgtcttacctctcctgttgtgtgtactgtctcacacccagcattaatttaacaccaccggcctccactgtgtgaccctgaggtcctatgttgcatcaacttcttttattatcctttattccgacctgcactcctttagcaaggaaggccatcctgaccctagccagaaaggggctgctccacttcccattctcaaaggcggctgtggactgcagggttacagcaaacacactgatgtggccccactcctgaccccatgctgcctctggaggaacccttccagatgctgctgtccacaaatattccaactggtagcctctatggagaggtgataaggccagctgttaatgcttttccccacagcctgcaaggtcagatggatgaagtgtccttgtgggtggctccgcagctcagctgcagacaacagggatggccctttgattttcttctgttcaacagaactgtggtctgtcttggggttctgttgtgggggtcagtggaagagtgcaatgtatgcctcagtttgtcactacacatcatgggcttgtccctgcagctgtggagggcttagtgccttgcagtggagagtgtgcatcctgggagcagtcagtgcttccccagctgttcctgggtaaggtgaagagacatctaactgggtagctgggcacaagctgagccttcctcagaggtgacagtggtctacagacattctggcttcctttgaggacaactgtcactttagcatgtagagtactcttaccgaccccatgtgaccttccagctctatgatgttccatgattgatttgctgttgacattcccatgtgaagagagatatatcacgctgctgacgatcggtgtcacaatgacccattaaagagtcaaaaaacatttgtgtgttgtgtccccatggtaccccagggcagtccccagtgtgccatttaggctcctgaagctcaggtggtacagaccagtgagtttctccaacctccaccagtaggtgccttgtgtgtggggattacaagtttggtgtgagtgcagaaccagaagacagttgtcctgtatcattacctccaatctccacttgccatgctagaattcaaaattgtggtaacacacacctttaatcccggcacttgggagccagaggcatggggatctctgagttggaggccaacctggtctacagagcaagttccaggatagtcaaggtgacatagagacctagcttgaaagggaaaaaaaaaatgtctgtaccttgtgccaggagaatgctctgggttccctggaactacagctccaggtagttgtgagccaccctatattggaaaacctggggtcctctgcaagagtcttaaccacagagctacctttccactccgcagcattctaactgctcctgtggctgtgaggggggagagcaggaacttgagttgaaaaaggcccttgctccatctcggcagctcactgccacttcgttgatggggaaaaaggaagactccttttcaaataaactcaactgcaactgaagtccccaaatgctgctgtgcccaaggcctcatccagtgccccatctgagaccatgcagcactctctcactgcttcaagcatcctgccagccctagccaggacccacagaggtagtcttcagcagcagcggtagctacagtgtacccattgctgtggttgatgactggccacagagtgcagctggagttcccaacacaacacctagtgtccctattcatcctgttcagactgctcttccagtccattggaggaaggagggactctagatgctgccatgtgtagtccttgttaaaaacaaaactaacttgctgcctgtcccatgagcaagaactgtaggaatgtgcctggaaatgcttctgcctggggccaggggacatggtgacaaggaaaccaaggtgacaaggacaccaaaacaaaaaggaacccctgggtctcctgcatcaacttctcccagccagcctatctctgctgctaggtgctctctgcagtgtggtccagctgtgtctctgacctggatcacacactaacctgctccacttttacaaagcccactgtatcatccatcctgaggctgagagaattcaaggtcagtctacagacaggtgcagtgcaggaagacccagctagcacgcctgtagaggcaggaccgtcaggaggccaagtcatctgctccatggcatgctccaggccatactggagtacttggcatcccacctcagcaagagctgaagcatcccttctgcaaccctgcccatagttacccagggtccttggaccccgagggagatgttgcaggtaccagccaggttttttggtccctccctctgtggataggagcgtaggacccctccacacctgtacatcatgttcaggtgaaatgcatgccaccagctacattaacgacctagccagatctggcagttaaagaattgttcctcatgagaaatgtcagggcattttaatcaaaatatctcagagggccctgccctggggggttccccactatcttacacaaacccatctccctgccctcccctgtcccggcccagcctgggatccatgggagtgggaggggtaacttgaggcaggcagcagctagcttctccagaggcaacagtgcagttgagtcctggcctctgccgaggctgggggctggcagccactgtcagtgctgggtcagacactcagagactttttccaaggtcaggttgaccagatgctgaggttccagacactttatgttttgtgacaggctttgggggatgaggaggaggtgctctaagcccattgtctgcacatgccctcctgcctcccttcctaggctgcctcccatagcccattaatatagtccaagctagcccctaagattctcctgcctcaggctcctggaaggctgggattataggaatgcattgctacacctagtccctgcctgttcttaaatcctaaagtgtgccagtgggatagggaccctccctagcacccacaatgacaggcctcgatagggcatgagaggtctgtggcaaagaggccacttgactttggaattctgttttccacaggtcacctgcttctttgtagccttattccccagctcactcacaaggctggggtggttctgcacatccaagttgaggccgcagggaagaaacacagcatggttcaggcagtgcgttgaccacacaggcaggtgtgactacagatggccagtgtgccctcaggcacacagccctgcccagcatcccctcccgctcttacccaccctgcccagcatcccctcccactcttacccacacacctcctcactccatccctctccccactccccataccccgctcctcacctcactcctccctctcaagtggaaggcctggtcttacctcatcttttcatcctgtctgaaatagaatggggctccagttagaccctccaggtctgccaccacaccaattcagggaagaataggtttcatgaagacccttcagccaggatggcttgcccccttcctccagctgaacttggagacctttgaagggtgtgggcaaggtcctcctgagccttggcaagcttcaacccctcatcataaggcacacacaaccttggattccagcaggaacttacttgtgccaggtgtttctacaatgacagtaggtttggagtcaggggaccaagtggcctcccttggtgtctccctctccatgtcctggtacccaataagccccagctcacatgtatttcagaaggccctgtacagctgactcccactgtgccgatgacctggggtggggggggggaacacaagacttggtggtggggtatccccaaggccctggtccccttccttgcctaggaccccaggggcagtgggattgctgcatgagccatacttgcagtagtagccaaagcaaatgacgtgggagtccgtgcagttgctgcaggagatggtctcgtactggtagatacctgcaatatatgagaagcagccccagactcccctgggccctccccagcctgggccactgccactgtggcccttagcctggaccatggttcacttaccacagtgacgctgacagtcaatgcggcctggggaggggaggacataacaggatagtgctttctgacaaggcccagagctcaacacctcagccccacttgtttttgtagcccaggataccctagcacagagaaggtagcctaggctgccttgtgatttgtggcaatcttcttgcctcgttccctcatttctgagtgctgggattacacgcttgtgctacatgagtttcatggatgtaggaaggggtcagttgcagtgaaagatggggataacctaagggaaggatggttccattgttcctaggtgccaccaggagactagtttgacagaaataagggggtgatgggcatgctagcaaacatttatgcaaaagggcctcctgcagagtcactcctccctgagccctgtttccagtgcccctagccctgaagtgccagcggccatgatcatcttcccctctgtggagcccactgctcactctctatgatggcgttctggatgaggcgcacttgctcccggaagatggcccgcagctcattggggaaataccctgatgtgagagtcacagcagaacggtcaagttcaggtgcgtagcagctcgcaccggccccacctgtttctctttttacctgggaagtacatcttcccctggtacagctggtccatcctctggtacacggcttctgctacttgatatagcttcttccgggctaagggcaggaggaaaaagcaagcaaatgagtggccctgcccggttccctgctgctcttctgaccctggaatgggttccgccgctcactgatctcagcaggaatggccagatggagctccttcatcgtgttctggatccaatcggagagcagcatccccgacacaggaatgtcacccacccaccacgacttgaggttcacgtggtgacgatagaaggagaacttctccgcgaaattggggtcgcactgcaggcagccccgggccagcgccgctgtcatgcccagaaacaacagcagggccatggcctggcccagcctgccttgcccaaacatcggcgccgccagcgccgcaccctccagccgcgcaccaaccaacggtgcctcccgcgccacgccctgccacgccgcaccaaccaacagctcgcgctgtggaccctggccgcgccatcccctgcccgggcctgatcatgcttccaactctggtcccgccccgcttagacatgtcccgcccaccgggcctgatggcgcaagcctttaatcccagcacttgggaggcagaggcaggcgaatttctgagttcgaggccaacctggtctacaaagtgagttccaggacagccaggactacacagagaaaccctgtctcgaaaaaaaaaaaaaagacagcgcctgcccacggatggctccgcccctacctggccaggccccgattagactcctgtcccaggcctggttccgcctacaggcctggtaccgcccacggatggctccacccctttctagcctgtcaccacacccaccccaccgccatccggacttctgtcccagggctggctctactggatctccccaggagagtgtaactgaatctctccagttacaattggcaactggtaatgccagtctgtccccaggctccaccccatccacagcgccttacgcatgcgctttgggctggcgccagttcccgagccagcgagggagggctcgtcccgcccctcatccgctccactacagccaattagcagcgcccgtcctggtctccaggggcgcggagtgccgcctgcctttcacaccgtgatcctccgaactcgggcgccacacctccatccgggctgcttccctttaagggaagtaaatccggctggcgggcgcggcctgggcggggcgtgcggcgtgtccctccgcgggcgtgtccctctgcgggcgcggccggagactgggcgaagcgagagacggttccggacagccaggtgggtcctccgagggccaaggcgggcggcgggcagcgggacttcatccctcagggtgacagtgtccagcgaccggcccagagtgggcgctggggacctggatctgtcaaaaggagggagaaaggaagcgtcatggatcaaaagcgtgtttaatatttgaggtcctagatagcacaggctagcctccagcggctggataggatcctccttcccatctccgctgactcatttgtttgaaatgatcacgtttctgttaaacttcattgaaggtctgggctcttgctctggagtgaagcatttgccttgtgtgtagaaagccctgggttctatccctacttctgcctcttcagcactcctcggcctcccctaaataagccattgaaaggctggatggagagactcaaaaacagatcacagaaagttaactttggccgcagtttctttttcttttttcttttcttttcttttcttttctttaattctttccttttatatttagcccaggctatcctggaactcagcgagatcaccctgcctgtgcctcctgaacgctgagattaaaggtctgcgccaataactttgccttttctcttccctcctgcctccaccccttccctaggctccatagaataaagtgcctacagtcaagtagaggttggcatagtgttaaggcagggcaattattattccagagctccacgtgtatccttgtaactttggtttctgatttgctaccgttatgcagagttgggagctcaggaactaggggtgggagtgtcaggggacagttaggtaggactctcaggtcagccagctcttccttcagcatggaggaagtggttactagctctgtaagtgatggggcttcagagaggtgctagctggaggcagcaggatgcaaaagagaccacagacttaaccattgacaaaggcagaagcagataacctgagaacttccgaaaaccaggttttaaccgcccctgtcctgggcttgtttttagaactcagtgaacagcagaggtgacaaggctagagagttccacccctggggcttcttgatgtctgtcctttctccatcttgatccattccagtgccatttaagttcaagggcagcctgggacacttagtgaaatctcacctcaaaaagagcaaaagggggctagtgctcttcctgaggtcctgaattcaattcccagcaaccacatggtggctcacaaccatctgtaatgggatctgatgccctcttctggtgtgtataaagacagcaacagtgtactcacatatataaaataaatcttaaaaaaaaagagcaacagggctgggggtgtaatcagggtggagccccgcctagaattcccccagtgagggctcaggagcagaacattaacttagggtgtgtatgagcctgggttcctccccagtattggaggaggggggtgataagccctaccccaaagtagaattaatttcaatgttagggcggagtgaacgtgatagaaacatatgtttgaattgaaatttatctgtctgggatcagagatgtggactgagcagagccccccatccccgaccttagtgtcaccctgagaccaggacgacactgcagggcactgtgtgaatggcatgcctcttacctaggagaaatgtagtttttattgtgtgtgtatgtgtgccacttgcctacaggagcctcttctgagggtgtcacgtgcggttgtgagctgccatgtgagtgcagggacctgaatcccagacctctgcaagaacagccgagcactcttacgcacagagctatggctccagcggtgtacacatcccagctggcttgtcactccctcggtagcccaggaccgtgtcaagttctcctgattcagcccccccaagaactagaactgcaggaatggatatatccagttataatggctttacaatggggcagaacacatcataaattagcaaaaatatgaatattgttgtacatttcatctctctttttttttcttttatgaggctaccagaaaatttaaaactgtatttggcgctcatagagatctagaggcttccaagacatttatcccatcactcaaaggtgtggtgacttcctgcttttagggataggggttgagacaagggctctctatgtggttctatgtatatcctggagctggagcttgctgtgtggatcaggctggcctcaagcttatagaaatctgtctgcctctacctccccagtactggaatcaaaagtgtgcaccactgcccagctatcgatgtttgcattacgactaccactactgttttttttttttaaagatttttatttatttcttacatgtaagtacactgtagctgtcttcagacacaccagaagagggcatcagaccccattacaggtggttgtgagccaccatgtggttgctgggatttgaactcaggacctctggcagagcagtcagtgctcttacccactgagccatctctccagccccactactacttactactactatatttgtttagcgtgcatgtgcaagctacagcaggcaaccttacggaggttggtggactccttgacaggagccagctcttccttccatgctgtggtcccttgggggtcccctgatgttccttatgttttaattcttcctatgtgcctgtggggtgagtgctgagaccgtgtcatgatgtatttgtttttattttatgagttgcctgcatgtatgtgtatggctggtgcagcgaccaccagatccccagaggactgcagttccagaggcttgtgaccccaaaccccaggccttgctggagcgccctatgctcatgcgctgctctcgccaccccccagcactagttttttcttaagtgtgatgcaagagatttttcattttggttagtggtatttgtccttttgggggagggaccaaagggccaccaaggaagccgtccccaactaggctgcttctgcttcactgtgcaggcaaggtgcagggcccattctcccacgtgcgtgctgcagccagttctcatgcagaactagttagtgaccctgttctctcccacccactgcttccctttccacttcaggtggcaaggggcggcatcacccacagccgcactagctcatggcagtggggccagggccagctctccagagctcatgaccctctgggtcgctttcctgactgccactggtggtgaggggggaggtggggtatcacctgtgtacctggggtacctcccagcagatgggtggcagggttggctctcctacactcacacccttggggctggctcacccacacccctaccaccagggccagctccactgggctaagctcagggcccactctaccaaagctctaccgaatactgtctccgatgagagatggggccaggtatagatggcccctggacatccacgtggtccccagcagctcatccccacagactctagagggaatatgagccgtggacattgacaccgacccctgccactgtataactacagattcagatgtggcccttgggctaggacctcactctagccccaggtggcagagctggcccctcacagtggctcttcacggctctccacctccatctctaagttaatctccacagtgctcacactgctccgcttctgttccccccatctccacagactggcgcgttgtgatgatccccctgacagcgggcccctgggtgacatccttatctgtgctggaacagacggggcctgtggctctagtgccatcacaggagggcagggctgtgggtggtcttcctcctatctgcactgtgcagactggatttgatttggttcggttttcatgagtcctaggcataagacggctttggccaccacgccaggcatcaagccaggatgcacaaaggactgccctggcagatgtaacaccaccaacagcaaggggtctctctgcccactgccagggggcttagtttttaatttaaagtttgtattttatgtcccagcacagtagcgcatgcctttaatcccagcaccccagaggcagaggcaggtggatctctgtgagctccaggccagcctggtctacagagtgagttctatgacagccaagactacacagagagatcctgtctcaaaacaaaaggaagaaacgtaaagttacttattgttgagtacaggtctgtgtgatgcgtgtgccgcacttgctcaggtgtagatggcacgggatgtctgggagctggctctctgtctgtcgcaccgagagttcccacacactggagtcaggtctgtagtctgttgcctcagcagtgcgagcctgggactctagtggggttagtttctaagacacagcctctctgtgcagtcttgtacggagttgttatttttttttttttttaaagatttatttatttattatatgtaagtacactgtagctgtcttcagacactccagaagagggagtcagatcttgttacggatggttgttagccaccatgtggttgctgggatttgaactctggaccttcggaagagcagtcgggtgctctaacccactgagccatctcaccagccccggagttgttatttttaaagagacagtgttgtcttgtcagggtccagcgtggctaagagctctcagagcacacacacactgcacacactatacccaggcatgataaggttcactgtaattgaacctcttgctaaattattgtaactgccatggactcattctgtgacccaggcttaccttaaactctcaatcctccagcctcagcttcctgagcgctgccatggagggagagttttcagactgcagcaaggctgagtgagtgtgaggtgagctggctctgggtcacagagcaacacctccatgaccgagtctggagtctgcagctgtccttagggctcactctggggtcagacactgcctgtcttgtgggctcactgggggaagggcctggtgtctgcagtcctaccccaggcctcgcagcagtggggcatctgaggcgcacagaatgtgaccacacttctctccttccaggatgcagtgctgagggagttatttaaacctcaaagacgtttgcatttatctatttgttcgtttattttgtgctggaggaagttaaaggagggaagagtctagtttcttgcccttgtggattccttcctgtggtactgtttctcaggcagtgacagtgccttcacccttggagccagctccctccagccctccccctccatgttgaaagccgtaagacccagttattcatttctcagaaagcttgcaaactctcacttcaaaagccaggcatggtgcggcaagtctgtcagcttgaggaaggggcaggaagattgtgaggctacgtgaggcaccttctgaaagctaaagcagaactgagtttcagatcctctgcatgtgacctcatgcttttcagcaggtgggatggcccagctcaccgtgaactccctgcaggacccccatactctgaaaagtcccaatgggtcgtctccgcagcctgtgccccatggaaacacctgggccaggcccggctgtggaaatcccctccactctgaaagtgtggtttcaccgagggaagttcccagcaatccccagcagttgggaatggacctggctttctcagaatgccctgcttcagatgtcttagccagaaaaggcaaaaccagttagagcaggaggactctgcagttgagtcccacaaaggacacatttcccttttctgaggaccatgctattgcagagtcttccttcttttcctttcccaagtgggtctggcgaacaaaacacttgaatacctgccagtcaagtaccaccctgaccacgcctcagcccctcactgggggattctaggcggggctccacctgtttcctttggttatctgatgatagttttttccttctttctgtatttagatcagaaagctagaatgtacaactttgtaaacaattccaaataaacactagggaagctattaagtcctattctagcctgggctacactttgagacttcgtctccaaaacaaaaagagaattgaccctagtttcttcatctgcaaaatagatctgtgcctactgccctgtagaaaatggtcattgtcagagaggagcccctcgaaggacccaggatgcagtcccaccccaataagggttcagaaacagtgtcagcagcgaccagaagcacaacagaggaagtgtgcagagacctcacttcaactttgttttgtctttgttggggtactgggtgtaagattcaggcactgaccccaagccactcccagtgacctttccatgtgggggtggccttgaggctgagctatgttcaggtttggggctgccctgccacagagtgaacacatggaactagctcaggccttgtctccaaggcaacagtcagatgtggaaacctccggaaggaagtgggtgactctgggctcctgagccctgcaccctggcctgggaggggtcagagccttattacttagagctctgttttcttggtttgttttcaggaggggaggaagaggaacctatgggtaccggggtaggagagcagtcttagcttacctcatggtgtccttctagaaggttctaagtgtctgtcatgtcttatctgtcagtaggacagcccaaagaagaggaccgtgcagtactggcatccagttctgagcagttgttggacctgagaggaggcgcccagcggcgaccaggggtcttgaggggaggagggctacaggctgcggccagcccaggtgtctgtgctggagaacctttgtttctgacaaaggacaattgattttaacagggattctacccatccccatagtttgtagaaaatatttgcaccagcagaagtggccatgcctttaatcctggcactcaagaggctatcaaggccagcctgggctacagaggggattccaggacagagaaacactgtctcaagaaagagaagaaaatacttgcttctccaaaaaccctctcacttcctaagaggacattgggctgtgaggagggccacagaacgcctctgccacttccgtgtctataggtcttggtgggaatacagggaaaatggaggaaaagacccatagcagcctggcatgggggtgtccgctcagccagtgggaggctgaggcaggaggacagagactcagggccaaatctgaggcagtgtctcaaataaaacctaagaaccagacaagtgaaagaaacttccagaaccttgttggtctaggtccctggaggcatcacccagctgagagggctgttccttcctatagtcctttgaggccagccccaggcctgcgacattcaagaggactcctcacacctgctcatggtggccccagctcctgcttgacacagcatggtgacagcattggagggactccccagagttttccccgggaaagccctgcggcagatggatggcccgcggtaggagaaggcctgccgcagcagccactgctcctgtcaactgaggcttgttcagagatggtggagtgtgtgcgcggtgcctgcaggacgacttgcaaatgcagaatagtcatagtgaaggtctgtgggcctgactgctatgctgcccagccctggacgaccaggggcaccaaggctctgcatgtgggaccagggaggcaagatgacaagatgaccaggggtaaaggccaacctgggctatttgaggctgtgtctcagaaagacaggagaggaaaaactggtggcttgccttaagtaattacctctcagggaggccccaggctggtctgcctgtctaaggggtcagaggcatggggttgaatcaggaagtcacagaagccaggcgagccctgggggcgtgtgtcagtaggctccgtgaggtgtctgccacctcagcctgtacagtgtgcgttaatgtccagcctcagcgcctcccacaagctgtatgtgtgccaaactagccaaccgtcagtctcacacccagagggcgcttggggcaggggattgctgccgtgccacctcttcaggggacccaaggtcatagtagggggtggttggctatccagaactgggtaatacccagtgtgcactgggtgggaggccaaggacatttcctgcataccctgcatgaagcgtgtggcccagtggccactgtggccggagagcagtctgaggtcaggagaactgtctggaaggctgtgaagtactggtcaggtgtgcgatggcggtggggtgcagtggacatgctatgaggaagttgggccatctggtatccacagactctttgcctgtgggctcctgcctctgggtaccctaccttgactggtgtctacagtgaccaccatgggggctcactgtcagatagttgtcaacctctgtttgtttttattgattttgacatggtctcactctatagaccaggctggctttgaattcacagaaatctacctgcttctgccccagggtgctgtgattacaggctttgccacatgggaagctcttgttttgtttttgtgacagagtctcatgtttgccagggctggtctggaaataggtatgtagcgttcaatggcctcgaatcccagctccctgcacctggacctgagccacacttgctttatagaaacaggcttatttcctagatacttttccatagtggtgttgcctctaaagtcagacttggaatgttgaagctgaccagcatcagccccagggaagcaacctctgcttcttgtccttgtctccagcgtgtgggtgagggagcagaccgagcattctcttgcagttctcgtgacttcctgatctgtgtgccttgcggctcactcgcaggtctaaggcacatagcacagtgtgttaagttctggctaagttgtacagtcaccacctctaattctagaacattccatcaccctatgaactacgatgtccttccccagccctcacatctcgacatttcccatcatgaagttccatagtgtgtccctttttgtctggtcccaccacacttagctatctgtcagactcttcttcctcttgtgcaagtctcagtcgtagccagcatgtaggtacccaggctgtgtctctctcttgtccatctgaggaccccgggctaaagctgggctctgtagtcagggccgtcatagctctgagtggaggtgtgacttcagttctgtccactctccttgaagggcccagcaggcacaacatggttgccacaactatataagaaaaaaagcggaagtgctgagggttgatgggagtgttatgagggttaaaagggttaactatgcagcggcagtgcttggtgtctcagctcacagttggaggcaagagggtcatcccgctgcatagtgacttggagaccagcctgggttacatgagaccctgtctgtaaaaaagacacacaagttattattgtgagtgaggtgaggctgcctctggtgggaggggctagcccacaccacatgccactccccatcccagcttccccttctgcctgtgctgtctctccagtttccctagcaacttgttacgccccaaggtccaactccagttgcctttccccgatggcctagcccatctcagggagcatggtgcagtgggtcctccctggcacactgacctgctgaagtctaggttctgtccccagctcttggaagaaaagacttgatcattgaatggagggctgcccggctaatccgggtgactgtgtgtcaggctcttcctccagtctgtaccgaacctctactcacacaggtcacacccgaggtgctagggacctgagcattgcttgctgcaggtaccaccatctgtttttgtcacctccatgtgctccctcatgtttcctgaagcagcagtcacagcagtccctggcccgtgtcaggagaacacaggcccatctgagaccatcattttgtgtgatgttggtgaaactggttcctgccagaagtctgcctgcgtgatgtttgtttctagaacagctcagaaaagtccctacgcttacacaggtcccacttccttaccctgcagcccatgctcatctacaacttggggcaatcctcctgcctcagcttcctaggtactgggattataagtgtgtgttatgagtagtagcctcccagttgtttctgtgtggcccagactggtgtaagtttgtgatcctcctgcctgagcatactgattgctgagatgatagtctgtgcacaagcccagcactaatgctgtcctttccggttttaggcctctggggacctgtagcacaggccaccatcttgccacattctttgcttcctgttctgagaatcaggtgccactaagatgtcaaacccattccttaaacaagtgttcaacaaggacaagacattcaggcccaaacgcaagttcgagcctggcacgcagcgcttcgaactacacaagcgtgcacaggcatctcttaatgcgggcctggatctgcggttggctgtgcagctgccgccaggtgaagatctcaacgactgggttgccgtgcacgtggtggatttcttcaatcgcatcaacctcatctacggtaccatcagcgatggctgcaccgagcagtcgtgcccagtcatgtccgggggccccaagtacgagtaccgctggcaggacgagcaacgcttccggaagcccacggcgctgtccgcaccccgctacatggacctgcttatggactggatcgaggtgcagatcaacaacgaggacatcttccccactaatgtcggtgagtcaggcccgtacccttgcctaccacaccaggaccatgtctgctgagcacacactgagcagaaagggccgaatgggtgtgtatatacctgttattttatgtgtatgtgtagcacacaacatgtgaggctctgtcctcggagctagcagcacagcatccccagcctcctgcttgacacccttctatctccctcccagcacccggtggtgacactgacccctagatgatcccagatgaccccagctgaaggtctcaccttgagcccacctataaactcccttctccactgaagaagacatgttttggactttggggcccagggtatagcgatcttcctagttcagtggttctccgccttcctaaggcagttaagtactaactaatacaggtagttcctcatactgtgctggcctcaaccatagagttctttgtggctacttcataacttattttctgctgttatgaatcataatatatgcctgatatctgatatgtggcctccaaagggtcgagagccacaggttaagagcaactgtcctagcctcttaacctgctcacctctttctctagctctggccctggggacatccagtgacgctggctgccttggctgtggaacacacacataaagtcatacatttgctagctgtgtggttggtgtcctcgggactatatagaaccccaggagtgggcagtaacagggtggcatctgccaggcctgggagacttccctggggctttggaaagggcagagcaaggtgctcagaatgggttgggaccctcatcacagagaggaaggctctgcagacaaataccagccacacttcatggaaactgatttttggattggcaggagactggttcctagacacagaccatgtgacctcgagcctaggccttgagctctctgagtctcatccattctcacctctgtggctcaggtggagcacatctcaggctaggctgccaggccctgacaggtctccttccggtccctctgcccacccccaggcacaccattccccaagaccttcctgcaggcagtgcgcaagatcctgtcaaggctgttccgtgtgttcgtgcacgtgtacatccaccatttcgaccgcatcgcccagatgggctctgaggcgcacgtcaacacctgctacaagcacttctactactttgtcaccgagttcaacctcattgaccccaaagagctggagcccctggtgagtgggggtgggcaccattactcctgctgggtggggtccaggccaccactactctgctgcagtgttctgggccagcagccagagggtgtccttagcactgggtcacacaggtgaggagacagagtatgatggcaatagttgagaaggcgcagggcctggttaccccaaggatctctgctccccatgctagtaaggctcatatactaatggtgggcatagcctgccctgcgtgctgccctccagaacacagaagtcctagatgctctggttcaccacagcagagagggtgccgtggtagccatcccatcccatggggctcatattagccatcccatcccatggggctcacagtgggtagagcactggccagatagcagcgcacgggacaggcagcctgtgctccacctcctggagaacaaggggtggattattgattgattgattgattttctttttctgatccttttccattctataacctagactggcctatgattcaccacatagtccacactagccgggaacctgaggtgatcctcctgcctcagcctcccaggcgcttggatcataggtctgtgccatcatgcctggtcacaatcaactttaaaatgttttgtctttctttttttttttcttttcttccttttttttctctctttttttaaagatttatttattattataagtaagtacactgtagctgtcagatgcaccaccagaagagggtggttgtgagccaccatgtgattgctgggatttgaactcaggacctttggaagagcagtcagtactcttacctgctgagccatctcgccagccctcttcctttttttttttttaaagacttatttgtagcgtgtaattattaaaaaaacaatccacccctgaaccactctgacattcccactcatccatcccctgaggcttatctgcttcgaacttactctaaaccctgaccccatctaaagtaccagtcagatttatagcagtaaattcttcatccccaaaatgcccacacagagaactcaaaactcagttgatattgacacaagccgcccacctcgattggacaaattgccctgcattacctgtcgctcttctgtggtatccatagctacctgtggctatttcaagccacatgtatccagttcatcttcctctcctataggttccatcttgtcacctcatctccatctccctctctgtcttgtctgtctctctatacttgtctctaaaactctcagcccaccttctttttccactgcccaatcacaggctctagccttatctttcacctgccctcacctgcttacagacagcaatctacacttacttgtctgtttgtttatttgtcttgttaggccagggtttctctgtgtagccctggctgtcctggaacctggaactcagagatccgcctgcctctgccttcccagtgctgggattatagacctggcttggtttctttgcatttttttttcaagacagggtttctctgtatagccctgctatacctggctgtaatgaagattctaagaagtatactttgctaagcttgccctgagatttctaactcttatccagtaaaatactgtaagaaagcatgcaagaccctccacgatattgcagggtcaaatctggggcattctagctgtgagaatgccagggttccaggaggctgagtttctttgaaactctttgcctcaggactgcttccaggtttccaaacctgtaatgcgagtcactactggagtggatgtagcagtgtacagtgccactgtggccagaagggggtgtgagatcctcaaaaactggagcttcagacacttggaactctggcctgtttcggaacggccatgcacagagactgagctgtctctccagcctcgtgctttttctttttctttctttctttttttaaaatttatttattattatatctaagtacactgttgctgtcttcagacacactacaagagtgctttggatcccattacagatggttgtaagccaccatgtggttgctgggatttgaactcaggaccttcggaagagcagtcagtgctcttaaccactgagccatctctccagccccgtgctttttctttttaacttttaattgtattatatttttgtttttctgtgttgtgtatttctgcgtgtgaacatggctgacgtggcatgcacctgaaggtcacaggacaacttgcaagagttagttctctctttccattctatggaacctggggctcaaacccaggtagtcaggtttgggtgcaagcatctttatttcctgagccatctcactggccccacagcctgcttctgtagttgttttaagacagaatctcataaagcctaggctggccttgaactcgagatccctcctgcccctacgtcccgagcaataacatgatagatatgaccacggctcctggcttgcccacttcccactgctgacctctctatcaagcagtgctggcccatagcccaggaccagacctcaggtggacttaatcacagcacatcaccccagatcagtggcacaggctctgtcagtcacagggagctgcccccacccaccatgcccactgttcagcgtctaacatgtcttgggttgtatgaggtctttgctacctgcttcttgttttctgatacctgcctggtctctacagaaagagatgacatcacggatgtgtcactgaggacccctcccgtccgctgagacttggggagacaactgtgtgcagctcgtgtctcaggagcatggcacgctcactcacgccactgtctgaggagcagcaagaccacagcttccgccccctctcgtggtgactgtgggccctgactctaacccgtccccttgccggcatccagggcctgaacttgaacctggacactgtgctttcagccactgggtttacactgtatgtgccatggcctccgagaggaggcaggatctggagccactgctaaccaccacttgtcccttctccatggctctctgccctgacagctttgtccctcacttgccaacctggaaggggaggggccaccagatgtcttctgtttacagccacattgtgtgtgggtgaccacataggcagccagcatacctccaaagatgaactaatgtgccatgccacccccagcacccccagggcaggactcccagtattgggtgttctgggggtctttgtaggtcaggaagggtgcatacactgcatgcctatgatcccaagactctgcaggcagctgcaaggaggattgctataaacttgaggccaccctgacctccacagtaatggtcaggccagccagggtctcataacaagattgtcttaaaaaaaaatgtaaaggagccaggcagggtggcacaggcctttgatcctagtcaggaggcagtgacaggcagatctgtcaattcgaggccggcctggtctacacagagagaccctgtcttaaagaaacaaaacaaaaccggtaaggttctgcacagtggggaggtgtttgccacgtgagcgtgagtgcacatgtgtgacccccacacccatggaggagcctgggagagccagacatagggtgcccaggggacagggagaatcaggcagccatgggctaccccagtgcgcagccacacaaacgcacacacagactggctctgttgtgaacacggctggcttcatttcctttctttttttacattgttggtttggttttgaaactggcctggaactcacagagatcctcctgcctctgcatcccaagtgctttgttaaagatgtaaggtaccaaacccaagtctattcagaaatatttttggttttgtttgtttgtttgtctttgtttttgttttgagacaggctcttactatgtagccctggctgtcctggaacttattctgtaggccagactggcctccaactcacagatccacctgcctctgcccccaagtgtcagccagctcatctggagatttttgggattactgataactggtttctagtggccaccctcctgggaacagtatctgggctaacctgggatccagtaatgaattcacttgtggctcccacccttagatctgcagttcctggaaggtggtgacaggaacctctctcttcagtggcagcctattgtgtagcaaaactatgtgtgttgtgtggcccctgtgggccacaggaccaaactccagcaggtccctgtctgtcatgccatggagggtgtagcagaatatgactgttcccagctccaacttttgagcctcatggccattccctgagacctctgcactctcaagaccctgaggaattctggttacttttccagaggctgccactaaactaaatgtgtacagtttaagcttggttgcctgagcccagggctgagagacacccctgggtacttcccgaagtcactgtgcccaatacccagctctggaagaatcagggaccagccctcaaggcttgactgagtgtatttctcacctgtaagacttggccaccttgccaaatcccagcagcccagggaggggtccacctgcctcattcactcccacctctgtgccagcctaagaataaagtggtcctctccatactgcgggctgctccttgttgtttctgcccagctcccttcttgaaagatggcctggtgacaagctttgataacagcctgttcgaccacgaagggcccaggtactacaagataacatgaaacgacatagaaagcagactcagtatagctgacaactttctttccttttgagatggggttttccttttgttgcatgaatgtgagttatgtgtgttgtgtggccactgtgagtgtgaaggtcagaggacaactctctgccttttacccctaaccacgcccccaggccccttactggggaattctaggcagggccttcatgccagtcctccagcccctctgatttaagtgaaaagcatacagtttgtttgtttgtttgtttttgttttgttttttgtttgtttgtttgtttgtttgtttgtttttgagacagggtttctctgtatagccctggctgtcctggaactcactctgcagaccaggctggtctcgaactcagaaatccgcctgcctctgcctcccaagtgctggaattaaaggtgtgcaccaccactgcccggcctacagttttgacagccgtctgaatctccatgttcgttttatggttgtagatcccaacattagagcaactttgtttagagtaatctcctgcttagcccttccaggtggtttgaaacaagcctcactgacttccagtttatgccgatccgatcctcctgcttctgcctcccaaattgtaagtttgccttgtgtaccctgctggagcagctgttgaaggctcacctgtgtgtgctgaggcagctctcagaggtgccccttgcaatgccgcttctcattcatagagggcgatgcggcctaaggaaggaaagtgccactgagtgctggtgaagccactgggctggtccccagcttcctccctgcctggcttctctggccttgagatgagtagctagagctggagggaagagcacttctttttagtgtcagacaggttaaggagaaatgtgatgtacaagagacacgagtgtcccaggtttgggatggagatggcctgtgcctatcacatggtcggatgatctacttcactaagtaatactgttgaaaggcactgtctttcccaaaatccgaggttttgtaggtcttcatttgaaggtcagcctgtgttcaatcaatgaggttacagtgacccgtgccagaaggcacagatgccacccggggtaaggggacatgagcaccctatcccctcacctccccagtggatatgataccctgagtctggatttgcctcttttggacagttcctgtcatggagtcctccactgtgtggccttttttatctggttttgtcactgagcagcctgaactcagtgtccctcaatgtcttttctggaatgacacccaggctgtggcaagggcacctggcctggccttgattggcaggatctggccttggcacacactatgtgtctagtgtgggtgttttaggtggcccttctgatggcccaaaggccacccagggtgcatggcccatgttactagatgtttctgtgaccactgcattgtttaccctgggatacttacagggacactgtccccaacatgtccccagagaagttaagaccactggagcaacaacacacagccttctccagcatccagttacctgaggacacagaatcaggcaggccctgtcacctccatgcctcctccacccagcccacacacagtgttctttgggttgttgggaacctggctgtgtggtcaggcaccgatgcctgctgtagtcttggtctcagtatgtgaaaggcctgtggcccagtcacaactcaggcatctgacccagatcaccagagagatcctctgtgctcagccctctgcatctcctgacccatagcccgtgtcccaggctagccacgtcactgttaccctggatgaggctaaggactgtgaatggtgttggtttgtcctgttgcctagacacagcaagatgccagccagtgacaaggactcgggcccctggggcatctaacaagatagatcagtgtagttcaccatcctatgtcactcactggtcactcttgggatgaccagatgaaggatggaggaggtgtgcagctgtttccaccatcaagctccaggctgctgtctctgcacactggagctctgctcgtctgacgctgatcccacccttccccgacaaccacccacttctgtcttgagggctctgccgactccagggacctcccatgagccgtgtgtcctgtgtccagctcatgctccctgagaagtgtgtgttctggatgccctctccatagctgagtactgccaattgaccttactgtacatttctagaaatgtagagatttatttattatgttggacaaggtggcacatgtctttaatcccagcactcaggaggcagaggcaggcagatttctgagttcgaggccagcctggtctacagagtgagttccaggacatccagggctatacagagaaaccctatcttgaaaacaaatttttggtttagttttgtttttcgagacagggtttctctgtgtagccctggctgtcctggaaatcactctgtagaccaggctggcctcgaactcagaaatccgcctgcctctgcctcctgagtgctgggattaaaggcatgtgccaccactgcccagggaaaacaaaatttttttaaaaatttttatttttaagttgtttgcaagcatgggtggcagtgaatccccaaagccagacccgtgggtggctttgattcaccagtgcaaggactgggaactaaactcaggcctggtgagagcagtatgcgttttcttctcatcaacatttaaaaaatattatatatgcgttgtatgcctgcatgtgtgtctgtgcaacatatatatgcccaatgtgtactgaaggcaggagaggccatcgaatccgctggagctgacagtacaggaggctgcgacctgccctgtgcttctggtgttgtgggggatccaccagagaagattactcagacacaggttttagcagacaaagtctttatgggccagtgactgcactatagtctctgtgtgtagagcccagtatagcctggagcctttctcagggtgagtttttaagcacaaaaccacatcctgaggtgatatacctcagttagcaagaacagttagccagatacggaactacagaagctaaaaaaacaggttagtacttgagagactttagcctaactataggccttgacgggttgggcctgtgctttagttttggcctgagcagtacttccatcatggagtcagatgtgctaaggtctgaggcctgttacattgggaatcttctgcgagaacagccagtgtttttaatcatgaaccatttctctaaccctccagttaaaattacaaaatattattattttattaagatgtttgttttatttatttattttatttatggaagtacactgtagctgtcttcagacacaccagaagagggcatcagatcccattatggatggttttgagtcaccatgatagttgctgggagttgaactcaggacctctggaagagcagtcagtgttcgactgctgagcctttgtgtgtgtgtgtgtgtgtgtgtgtgtgtgtgtggtgcagtggttaagagcgctagttgctcctacagaagtccaggatttggttcctggaacctgcactgaccagttcacaccctcctctgactccagctccaggggacctaacaccctcttctaacttccactctccgggcacctgcacacatgtggcatacagtcagacacacgtggttacaaataaaaataaaacatttaaaattaaattaattaacagatgagtatggtggtgcacccctttaatctcatcactcaggaggcggaggcaggtggatctttttaagttcaagtccagtctaatctagagggtgagttccaggacagccagagtgaaacacacacacacagcctgtcttaaaaaaaaccaaaacaataaaaataaatacaaaacttactttggggaaatgaagttgaagctcagtcctggtgtgactaagtctcttggtttgatcttctgcacccacataaaccgggtgttctggtgtaaccaaccccagcacttaggaggtggatgtaggagattgatgcaaaaatcccatctaaaaaaatccaaaaggagaagagaaatataggcttgggagacccaggattaagccaggagccacccagtcatgtgaagaatggtgtgaggtttagcctgccatgttgactcccagtccccagctcataccctggtcctttggcagacctgctgacctcaaaatcagtcagccaccttctttaagagtccaggacagccaggaccacacaaagaaaccctgtctcaaaaaaacaaaaaacattttaaaaaaaaaaaagagtggctaaagccgggcggtagtgacacacgcctttaatcccatcacttgggaggcagaggcaggtggatttctgagttcaaggccagcctggtctacaaagtgagttccaggacagccatggctatacagagaaaccttgtctcaaaaaaacaaaacaaaacaaaaaagaatggctaaggatgctcaattagaacaacttactggctagagttggctctgggcctctctaagcctctattggcccagcagctgggccccacattcagcacagaacaagaggtctggaatggcccgaacacatgtgttggtttcaaggactacaggttggcttgtggaccagggtggcagagcatgtgtctattgtaccttccagggggcctgttacagtcagggggcagggacatcaagcctggatccacctcctgctagctgtctcagttcttcctctatggcctgggctcagtgtggccaggccaactgcaacaagtgactactagtttaggagccaaaatcggtcatcttatgtgtgactagaggtcacaagtctgacaagagttaaaaaataaggccagcatggctgggctgggcttttcctgcggctggctctggtgcttgtcccgtggctggctctggtgcttgtccctgtgtgaagagacctgtgcctcggttcctccctcttcccctttaatctcctgactctgctgtgagcctctgtctccctttgaggaggagcccacagtgacactgggctcccaatgatccatgacggtccccagctcaagtttcttggctcaggccgcaggaggtgaggtggcacacccctctcagtgcctcacagcaaaaattacagtccccatgcaaactccaggttctaatgtgttctaggtccctgccagcaaggaccaggtggcctcccgaagtcaccggtatcctcaggacttggtcagaagaggcagaaaggaggacatgggactgaccagtgactggttcaccagtcactaggacaaggtgctggctttgaaccaattgctgagccagtccttcacagccacactgtacagccctgtcactcccttagggacagtgagtgctgagttggactccaaaggaggtgggtcttatgtggtgtgatctggtgaggacaggccctaaggctgccccgatgttcacagcctcgtcagacctgacagccataactccctggccacacccactgctcccaggcttctcccaatcccaagcataggacactgacaggaccaggttctgtccatactctgcccagtgactggggacagtgaagtggcaagtttggcttgcttgcatgcctgttaccccacttgggcccactcgttaggggtatagtgctggatgagtgctctgcctggagtggaggctcagaatacatttaccaaattctactatctcagccctaggtgattattctgagtgctaggttgtggactcttcccaaacctccttggtgttcatgggtctgtatgggatcctctgagcctggtgtgacagctttacccctcccctaagggtattggggggggggttgtagcagtcctagcacctgctccacaaagctgccaaaggcatgactctagcttgcacttatggatgtggacagaatgctgaaaccaagggaagggaaaatagcacacatggaggggcgatgggaacagaaagcaggcaacacagtcagataaccgaggctgggagaatgtgatggcccattcctgtcaccccagagtagcgatggttggggccatgggaagcttgactctagatgagagctaagcaaagaccctgtctcaaaacaaaacaaaacaaaacaaaaggttctgggggcgtggtcagaggtggagcccctgtcggggaggagccactgcataaaaatcccccccccccccccccccgtgaagggctttagggcgtggctcaacaatgagttctgccttagcaggtggaaaggtctgggttctattcctaacccgctggcaaggaaggagagagacaggaggagccagcctgctaggaattgggccaagcgggaagctgaggctgttggcctggggccccacctcacttcctgtttttcttccctctgtaagatctccctaagattctgcttgaacctacagctctggtggtcccagttgggcctaacaccttggacagtcctaagccctttccaaggttggccacgtcccctgggaacctggggttgggggtaagcttaggaccacctttcctgactgtcctggccatgtctatccttcactcgggctagaccaacccctcacctggccagccaagcctagtctgtaaagacagaggaaacagagggtatcacacgggcttcctgcaggcatcccttgccaaagagccagtgacatcctcctggggcagaggctgagccagtaggggaagtcaggccttcctgtcaccccagctcccaacccccacgctgggaggcctctgagagtcccacaccgctgggagcctagcttgtaaacaggcggctggagggagagacttgacagcaggttggcagcttgcctgggcacggcagggcagggttgagtgagcagctcccagtccctgcctggtgcctatagggtgaacatccccttcctgttcctactggctgcccttttgagataaaagtgtggtaaaaggcggctccctctgagcagccatgtagactccaggtggccatttgcaagttggaagacgtacttggctgtcagactcacagaactttttgcacagggtgtgtgcagtgcaggggccacacatcccagttctgaaggtttagcctcgtgactggtaaggactccaggaagaagtaacccgtgtcaagtacagcttcctatcccgtgagcttcccctgtttccctatttctaacagggctcctggaggcagtctcaggacaggtctggattagggcacagaactcacaccttaacgagggctttgtaatttggcttttcttcccagcatttgaactaagttgcaggaaacaaaatagattagagctatttgctgccatcagtgtgaacggctgacccaggtgggccacgcttgaatgtgggtgtcatgttttatttgaattgttagcctgagataggatctggctaggtagccccaaactacagagacatgctggcccccgtggacacacacacacatgctacagctagccacaggtagaagctatttctcttacatgtgtcccaggaatgggctcaggctataattggtggcaaactcctttaacagctgagtagagacccttgtttgagtctgccaggaattgatccctgactgccttgagctgaagttctatcccctgcccaaatctgtccaggtaatgaaccttgtacaggcatgacaatctgaattagagacaaacatttctgccaatgcaatcactaatgacgacaatgaggctcgggagtcagacagatgactcataagttaagccaaactgttactcttacagagaacccagggtacagcccagcacccacatcaggcatcgtgtaatttcacctctcttctgactttccaggcacctgtatgcataaggcacacacactcacacggacgaggacctgtgtgagtgcacacaaacacacaaagagctgcttgaggttcatgaggctccagcctcagtagagggtggtggtaaaaacttgtagacaaactaccctgaagagggaaaacaacctctttgtgcacggaagcagccgaggcagcaggcacaacgcggtctgactgtatccgaacctgaatcggggatcctagccccttcttgtcccagctatccccaccgagggctgcaaaggacccaagaggttcaagaagggttcatcacggattgcagagctggagcacaggacaagggcatcagtattcagtaaaattagggctggcttgccctccttcggcagctgaacgcggcacccggctcaaggacagggagcagaacctgcagcgcgcaagccagcgggccaactgtgacacaggagaaggcggcctcacggcccaaactgaagccttcagtacccttctgcgcaggcgcaggcgactccggaggctggtcaccagcctctccacacagtcctctcccaccccccagccaggtcacgcggctgcagtcgagtatcttttcacgctccgcccccaccgtgggagtgcgcaggcgcgcttgaagcttcgcgccccacttccctcggaatctccccttccccctgccagctcgaagtgcgcagccgtgtttggagtcgccaacacggtcgctgcgcagctccactccgctccccgctaagctccgccccttaaacgggagcgcgcagccgtattctgcattccccggcgtgctcttctcgctgcggccttcgacgctcctggaagctccgcctcctctgttccctgagaaaggcggagactggtgcggaggggcggggtaacttcgggaccgcgcctataaaggtggccgcgccggccgcgcgcgcggctcctctcggcggcagcggcccagtggaggggtccgtggtggcggtggtggcggcggtggcggcggcggcggcggcgacggcggcggcggcggcggcggcagcagcagcggtggctgtggcggcgctgttccccgcgcagtcctcggagcggggtccgggctgtgctaggtgaggtgacggcgctgcgaccccggccggtgtccgaccccggtgagcgcggcgccaagggcgacattctccgagggaggaaggaagcccgagtcaggcgcgggagctccgccgagccccggccgcctccgcccggccgagcgcctctctcagcctcggtcctttgtctcctccgcccgcagggtcgcctcccaagccgccccccgggccccgcgtcccctcccccgctggtggggcccggactgaagatggtgcagaagagaacagccgaacttcagggcttccaccgttcgttcaaggtgaggggtcctgtccgggggtcccattgcagtgacgggtgcgacggataagcagagcctactcgggaggctggtgcagggcttgggaggggtgcttgcattggacttttgtgctggaggtggtgggggtcagcaggccgcagccctgtccccatcctcctagtagctctctcttctaggaccctcaacccccacccccaggcttgtgattggtggctctgtgtcccttgcagttagcccgatcacagtcgtctgtttctgtgtgtgatcctaggcaaatcgagtgtttctgttccttgcaacttccaggcctgtcttgtgctggttgggagagtcagtaagctgcagccttgcttctagctgcctactaactcttcatgaactgccccaggctcccctgtgatctgtggctgtgtccctagcagtttctcagcccgggctttcctacctctgtatgtggtctctgatggactttacatttgtttcctgcagtgtgtgcttgttgcaggctacaacctgtccccggctgcctagtagctctttctttcaggacccactcccaccactgatt

SEQ ID NO: 2580 - DNA, 2804 bp, Mus musculus
acaccgtgatcctccgaactcgggcgccacacctccatccgggctgcttccctttaagggaagtaaatccggctggcgggcgcggcctgggcggggcgtgcggcgtgtccctccgcgggcgtgtccctctgcgggcgcggccggagactgggcgaagcgagagacggttccggacagccaggcctctggggacctgtagcacaggccaccatcttgccacattctttgcttcctgttctgagaatcaggtgccactaagatgtcaaacccattccttaaacaagtgttcaacaaggacaagacattcaggcccaaacgcaagttcgagcctggcacgcagcgcttcgaactacacaagcgtgcacaggcatctcttaatgcgggcctggatctgcggttggctgtgcagctgccgccaggtgaagatctcaacgactgggttgccgtgcacgtggtggatttcttcaatcgcatcaacctcatctacggtaccatcagcgatggctgcaccgagcagtcgtgcccagtcatgtccgggggccccaagtacgagtaccgctggcaggacgagcaacgcttccggaagcccacggcgctgtccgcaccccgctacatggacctgcttatggactggatcgaggtgcagatcaacaacgaggacatcttccccactaatgtcggcacaccattccccaagaccttcctgcaggcagtgcgcaagatcctgtcaaggctgttccgtgtgttcgtgcacgtgtacatccaccatttcgaccgcatcgcccagatgggctctgaggcgcacgtcaacacctgctacaagcacttctactactttgtcaccgagttcaacctcattgaccccaaagagctggagcccctgaaagagatgacatcacggatgtgtcactgaggacccctcccgtccgctgagacttggggagacaactgtgtgcagctcgtgtctcaggagcatggcacgctcactcacgccactgtctgaggagcagcaagaccacagcttccgccccctctcgtggtgactgtgggccctgactctaacccgtccccttgccggcatccagggcctgaacttgaacctggacactgtgctttcagccactgggtttacactgtatgtgccatggcctccgagaggaggcaggatctggagccactgctaaccaccacttgtcccttctccatggctctctgccctgacagctttgtccctcacttgccaacctggaaggggaggggccaccagatgtcttctgtttacagccacattgtgtgtgggtgaccacataggcagccagcatacctccaaagatgaactaatgtgccatgccacccccagcacccccagggcaggactcccagtattgggtgttctgggggtctttgtaggtcaggaagggtgcatacactgcatgcctatgatcccaagactctgcaggcagctgcaaggaggattgctataaacttgaggccaccctgacctccacagtaatggtcaggccagccagggtctcataacaagattgtcttaaaaaaaaatgtaaaggagccaggcagggtggcacaggcctttgatcctagtcaggaggcagtgacaggcagatctgtcaattcgaggccggcctggtctacacagagagaccctgtcttaaagaaacaaaacaaaaccggtaaggttctgcacagtggggaggtgtttgccacgtgagcgtgagtgcacatgtgtgacccccacacccatggaggagcctgggagagccagacatagggtgcccaggggacagggagaatcaggcagccatgggctaccccagtgcgcagccacacaaacgcacacacagactggctctgttgtgaacacggctggcttcatttcctttctttttttacattgttggtttggttttgaaactggcctggaactcacagagatcctcctgcctctgcatcccaagtgctttgttaaagatgtaaggtaccaaacccaagtctattcagaaatatttttggttttgtttgtttgtttgtctttgtttttgttttgagacaggctcttactatgtagccctggctgtcctggaacttattctgtaggccagactggcctccaactcacagatccacctgcctctgcccccaagtgtcagccagctcatctggagatttttgggattactgataactggtttctagtggccaccctcctgggaacagtatctgggctaacctgggatccagtaatgaattcacttgtggctcccacccttagatctgcagttcctggaaggtggtgacaggaacctctctcttcagtggcagcctattgtgtagcaaaactatgtgtgttgtgtggcccctgtgggccacaggaccaaactccagcaggtccctgtctgtcatgccatggagggtgtagcagaatatgactgttcccagctccaacttttgagcctcatggccattccctgagacctctgcactctcaagaccctgaggaattctggttacttttccagaggctgccactaaactaaatgtgtacagtttaagcttggttgcctgagcccagggctgagagacacccctgggtacttcccgaagtcactgtgcccaatacccagctctggaagaatcagggaccagccctcaaggcttgactgagtgtatttctcacctgtaagacttggccaccttgccaaatcccagcagcccagggaggggtccacctgcctcattcactcccacctctgtgccagcctaagaataaagtggtcctctccata

SEQ ID NO: 2581 - protein, 217 aa, Mus musculus
MSNPFLKQVFNKDKTFRPKRKFEPGTQRFELHKRAQASLNAGLDLRLAVQLPPGEDLNDWVAVHVVDFFNRINLIYGTISDGCTEQSCPVMSGGPKYEYRWQDEQRFRKPTALSAPRYMDLLMDWIEVQINNEDIFPTNVGTPFPKTFLQAVRKILSRLFRVFVHVYIHHFDRIAQMGSEAHVNTCYKHFYYFVTEFNLIDPKELEPLKEMTSRMCH

SEQ ID NO: 2582 - DNA, 2665 bp, Mus musculus
acaccgtgatcctccgaactcgggcgccacacctccatccgggctgcttccctttaagggaagtaaatccggctggcgggcgcggcctgggcggggcgtgcggcgtgtccctccgcgggcgtgtccctctgcgggcgcggccggagactgggcgaagcgagagacggttccggacagccagcccaggctatcctggaactcagcgagatcaccctgcctgtgcctcctgaacgctgagattaaaggcctctggggacctgtagcacaggccaccatcttgccacattctttgcttcctgttctgagaatcaggtgccactaagatgtcaaacccattccttaaacaagtgttcaacaaggacaagacattcaggcccaaacgcaagttcgagcctggcacgcagcgcttcgaactacacaagcgtgcacaggcatctcttaatgcgggcctggatctgcggttggctgtgcagctgccgccaggtgaagatctcaacgactgggttgccgtgcacgtggtggatttcttcaatcgcatcaacctcatctacggtaccatcagcgatggctgcaccgagcagtcgtgcccagtcatgtccgggggccccaagtacgagtaccgctggcaggacgagcaacgcttccggaagcccacggcgctgtccgcaccccgctacatggacctgcttatggactggatcgaggtgcagatcaacaacgaggacatcttccccactaatgtcgaaagagatgacatcacggatgtgtcactgaggacccctcccgtccgctgagacttggggagacaactgtgtgcagctcgtgtctcaggagcatggcacgctcactcacgccactgtctgaggagcagcaagaccacagcttccgccccctctcgtggtgactgtgggccctgactctaacccgtccccttgccggcatccagggcctgaacttgaacctggacactgtgctttcagccactgggtttacactgtatgtgccatggcctccgagaggaggcaggatctggagccactgctaaccaccacttgtcccttctccatggctctctgccctgacagctttgtccctcacttgccaacctggaaggggaggggccaccagatgtcttctgtttacagccacattgtgtgtgggtgaccacataggcagccagcatacctccaaagatgaactaatgtgccatgccacccccagcacccccagggcaggactcccagtattgggtgttctgggggtctttgtaggtcaggaagggtgcatacactgcatgcctatgatcccaagactctgcaggcagctgcaaggaggattgctataaacttgaggccaccctgacctccacagtaatggtcaggccagccagggtctcataacaagattgtcttaaaaaaaaatgtaaaggagccaggcagggtggcacaggcctttgatcctagtcaggaggcagtgacaggcagatctgtcaattcgaggccggcctggtctacacagagagaccctgtcttaaagaaacaaaacaaaaccggtaaggttctgcacagtggggaggtgtttgccacgtgagcgtgagtgcacatgtgtgacccccacacccatggaggagcctgggagagccagacatagggtgcccaggggacagggagaatcaggcagccatgggctaccccagtgcgcagccacacaaacgcacacacagactggctctgttgtgaacacggctggcttcatttcctttctttttttacattgttggtttggttttgaaactggcctggaactcacagagatcctcctgcctctgcatcccaagtgctttgttaaagatgtaaggtaccaaacccaagtctattcagaaatatttttggttttgtttgtttgtttgtctttgtttttgttttgagacaggctcttactatgtagccctggctgtcctggaacttattctgtaggccagactggcctccaactcacagatccacctgcctctgcccccaagtgtcagccagctcatctggagatttttgggattactgataactggtttctagtggccaccctcctgggaacagtatctgggctaacctgggatccagtaatgaattcacttgtggctcccacccttagatctgcagttcctggaaggtggtgacaggaacctctctcttcagtggcagcctattgtgtagcaaaactatgtgtgttgtgtggcccctgtgggccacaggaccaaactccagcaggtccctgtctgtcatgccatggagggtgtagcagaatatgactgttcccagctccaacttttgagcctcatggccattccctgagacctctgcactctcaagaccctgaggaattctggttacttttccagaggctgccactaaactaaatgtgtacagtttaagcttggttgcctgagcccagggctgagagacacccctgggtacttcccgaagtcactgtgcccaatacccagctctggaagaatcagggaccagccctcaaggcttgactgagtgtatttctcacctgtaagacttggccaccttgccaaatcccagcagcccagggaggggtccacctgcctcattcactcccacctctgtgccagcctaagaataaagtggtcctctccata

SEQ ID NO: 2583 - protein, 156 aa, Mus musculus
MSNPFLKQVFNKDKTFRPKRKFEPGTQRFELHKRAQASLNAGLDLRLAVQLPPGEDLNDWVAVHVVDFFNRINLIYGTISDGCTEQSCPVMSGGPKYEYRWQDEQRFRKPTALSAPRYMDLLMDWIEVQINNEDIFPTNVERDDITDVSLRTPPVR

SEQ ID NO: 2584 - DNA, 2868 bp, Mus musculus
acaccgtgatcctccgaactcgggcgccacacctccatccgggctgcttccctttaagggaagtaaatccggctggcgggcgcggcctgggcggggcgtgcggcgtgtccctccgcgggcgtgtccctctgcgggcgcggccggagactgggcgaagcgagagacggttccggacagccagcccaggctatcctggaactcagcgagatcaccctgcctgtgcctcctgaacgctgagattaaaggcctctggggacctgtagcacaggccaccatcttgccacattctttgcttcctgttctgagaatcaggtgccactaagatgtcaaacccattccttaaacaagtgttcaacaaggacaagacattcaggcccaaacgcaagttcgagcctggcacgcagcgcttcgaactacacaagcgtgcacaggcatctcttaatgcgggcctggatctgcggttggctgtgcagctgccgccaggtgaagatctcaacgactgggttgccgtgcacgtggtggatttcttcaatcgcatcaacctcatctacggtaccatcagcgatggctgcaccgagcagtcgtgcccagtcatgtccgggggccccaagtacgagtaccgctggcaggacgagcaacgcttccggaagcccacggcgctgtccgcaccccgctacatggacctgcttatggactggatcgaggtgcagatcaacaacgaggacatcttccccactaatgtcggcacaccattccccaagaccttcctgcaggcagtgcgcaagatcctgtcaaggctgttccgtgtgttcgtgcacgtgtacatccaccatttcgaccgcatcgcccagatgggctctgaggcgcacgtcaacacctgctacaagcacttctactactttgtcaccgagttcaacctcattgaccccaaagagctggagcccctgaaagagatgacatcacggatgtgtcactgaggacccctcccgtccgctgagacttggggagacaactgtgtgcagctcgtgtctcaggagcatggcacgctcactcacgccactgtctgaggagcagcaagaccacagcttccgccccctctcgtggtgactgtgggccctgactctaacccgtccccttgccggcatccagggcctgaacttgaacctggacactgtgctttcagccactgggtttacactgtatgtgccatggcctccgagaggaggcaggatctggagccactgctaaccaccacttgtcccttctccatggctctctgccctgacagctttgtccctcacttgccaacctggaaggggaggggccaccagatgtcttctgtttacagccacattgtgtgtgggtgaccacataggcagccagcatacctccaaagatgaactaatgtgccatgccacccccagcacccccagggcaggactcccagtattgggtgttctgggggtctttgtaggtcaggaagggtgcatacactgcatgcctatgatcccaagactctgcaggcagctgcaaggaggattgctataaacttgaggccaccctgacctccacagtaatggtcaggccagccagggtctcataacaagattgtcttaaaaaaaaatgtaaaggagccaggcagggtggcacaggcctttgatcctagtcaggaggcagtgacaggcagatctgtcaattcgaggccggcctggtctacacagagagaccctgtcttaaagaaacaaaacaaaaccggtaaggttctgcacagtggggaggtgtttgccacgtgagcgtgagtgcacatgtgtgacccccacacccatggaggagcctgggagagccagacatagggtgcccaggggacagggagaatcaggcagccatgggctaccccagtgcgcagccacacaaacgcacacacagactggctctgttgtgaacacggctggcttcatttcctttctttttttacattgttggtttggttttgaaactggcctggaactcacagagatcctcctgcctctgcatcccaagtgctttgttaaagatgtaaggtaccaaacccaagtctattcagaaatatttttggttttgtttgtttgtttgtctttgtttttgttttgagacaggctcttactatgtagccctggctgtcctggaacttattctgtaggccagactggcctccaactcacagatccacctgcctctgcccccaagtgtcagccagctcatctggagatttttgggattactgataactggtttctagtggccaccctcctgggaacagtatctgggctaacctgggatccagtaatgaattcacttgtggctcccacccttagatctgcagttcctggaaggtggtgacaggaacctctctcttcagtggcagcctattgtgtagcaaaactatgtgtgttgtgtggcccctgtgggccacaggaccaaactccagcaggtccctgtctgtcatgccatggagggtgtagcagaatatgactgttcccagctccaacttttgagcctcatggccattccctgagacctctgcactctcaagaccctgaggaattctggttacttttccagaggctgccactaaactaaatgtgtacagtttaagcttggttgcctgagcccagggctgagagacacccctgggtacttcccgaagtcactgtgcccaatacccagctctggaagaatcagggaccagccctcaaggcttgactgagtgtatttctcacctgtaagacttggccaccttgccaaatcccagcagcccagggaggggtccacctgcctcattcactcccacctctgtgccagcctaagaataaagtggtcctctccata

SEQ ID NO: 2585 - protein, 217 aa, Mus musculus; identical to SEQ ID NO: 2581

SEQ ID NO: 2586 - DNA, 2730 bp, Mus musculus
actgggtaatacccagtgtgcactgggtgggaggccaaggacatttcctgcataccctgcatgaagcgtgtggcccagtggccactgtggccggagagcagtctgaggcctctggggacctgtagcacaggccaccatcttgccacattctttgcttcctgttctgagaatcaggtgccactaagatgtcaaacccattccttaaacaagtgttcaacaaggacaagacattcaggcccaaacgcaagttcgagcctggcacgcagcgcttcgaactacacaagcgtgcacaggcatctcttaatgcgggcctggatctgcggttggctgtgcagctgccgccaggtgaagatctcaacgactgggttgccgtgcacgtggtggatttcttcaatcgcatcaacctcatctacggtaccatcagcgatggctgcaccgagcagtcgtgcccagtcatgtccgggggccccaagtacgagtaccgctggcaggacgagcaacgcttccggaagcccacggcgctgtccgcaccccgctacatggacctgcttatggactggatcgaggtgcagatcaacaacgaggacatcttccccactaatgtcggcacaccattccccaagaccttcctgcaggcagtgcgcaagatcctgtcaaggctgttccgtgtgttcgtgcacgtgtacatccaccatttcgaccgcatcgcccagatgggctctgaggcgcacgtcaacacctgctacaagcacttctactactttgtcaccgagttcaacctcattgaccccaaagagctggagcccctgaaagagatgacatcacggatgtgtcactgaggacccctcccgtccgctgagacttggggagacaactgtgtgcagctcgtgtctcaggagcatggcacgctcactcacgccactgtctgaggagcagcaagaccacagcttccgccccctctcgtggtgactgtgggccctgactctaacccgtccccttgccggcatccagggcctgaacttgaacctggacactgtgctttcagccactgggtttacactgtatgtgccatggcctccgagaggaggcaggatctggagccactgctaaccaccacttgtcccttctccatggctctctgccctgacagctttgtccctcacttgccaacctggaaggggaggggccaccagatgtcttctgtttacagccacattgtgtgtgggtgaccacataggcagccagcatacctccaaagatgaactaatgtgccatgccacccccagcacccccagggcaggactcccagtattgggtgttctgggggtctttgtaggtcaggaagggtgcatacactgcatgcctatgatcccaagactctgcaggcagctgcaaggaggattgctataaacttgaggccaccctgacctccacagtaatggtcaggccagccagggtctcataacaagattgtcttaaaaaaaaatgtaaaggagccaggcagggtggcacaggcctttgatcctagtcaggaggcagtgacaggcagatctgtcaattcgaggccggcctggtctacacagagagaccctgtcttaaagaaacaaaacaaaaccggtaaggttctgcacagtggggaggtgtttgccacgtgagcgtgagtgcacatgtgtgacccccacacccatggaggagcctgggagagccagacatagggtgcccaggggacagggagaatcaggcagccatgggctaccccagtgcgcagccacacaaacgcacacacagactggctctgttgtgaacacggctggcttcatttcctttctttttttacattgttggtttggttttgaaactggcctggaactcacagagatcctcctgcctctgcatcccaagtgctttgttaaagatgtaaggtaccaaacccaagtctattcagaaatatttttggttttgtttgtttgtttgtctttgtttttgttttgagacaggctcttactatgtagccctggctgtcctggaacttattctgtaggccagactggcctccaactcacagatccacctgcctctgcccccaagtgtcagccagctcatctggagatttttgggattactgataactggtttctagtggccaccctcctgggaacagtatctgggctaacctgggatccagtaatgaattcacttgtggctcccacccttagatctgcagttcctggaaggtggtgacaggaacctctctcttcagtggcagcctattgtgtagcaaaactatgtgtgttgtgtggcccctgtgggccacaggaccaaactccagcaggtccctgtctgtcatgccatggagggtgtagcagaatatgactgttcccagctccaacttttgagcctcatggccattccctgagacctctgcactctcaagaccctgaggaattctggttacttttccagaggctgccactaaactaaatgtgtacagtttaagcttggttgcctgagcccagggctgagagacacccctgggtacttcccgaagtcactgtgcccaatacccagctctggaagaatcagggaccagccctcaaggcttgactgagtgtatttctcacctgtaagacttggccaccttgccaaatcccagcagcccagggaggggtccacctgcctcattcactcccacctctgtgccagcctaagaataaagtggtcctctccata

SEQ ID NO: 2587 - protein, 217 aa, Mus musculus; identical to SEQ ID NO: 2581

SEQ ID NO: 2588 - DNA, 100033 bp, Homo sapiens
tctataaaaccccagactcctctttggtctgcatgtatgcctcaaattccaattctttcttgccaaataaaacattaactttagagattcatctctacatacttattttgaccttgacattattttccttgtggaaaaaaaaagaacttttatctaaggaatgcaagtcatttttaattatcaggcccagacagccaggagcggtgactcacgcctgtaatcccagcactttgggaggctgaggggggcggatcacctgaggtcaggagttcgagaccagcctggccaacatggtgaaaccccgtctctactaaaagtgcaaaaattagccgggcatggtggcaggcacctgtaatcccagctactcgggaggctgaggcaacagaatggcttgaacctgggaggcggaggtggcagtgagcagagattgtgccactgcactccagcctgagcaacaagagcaagactctgtctcaaaaaaaaaaaaaaaaaaaaaaactaggagaagctcctgatgggccagacagtgtaaaccaggaggaccctgggggtcctaggactcacctcctctctctccctacccactcagggtgtggatttcaatgtgggcagcctcctgggacctcagcagggtggtggatcatgggatgcagtctcttgggggctcttggaatcccttacccaggcggtctcaaccaggggtgattctgcacccaggaaacactgggcgatgtctgggaacatttgtgattgtcacagctaaggtgcaaggaagctcctggcatggagtgggtggaggccacggacgctgcttaccaccctgcagtgcccaggatagcccaccccagagaacaatctggccctgatgtccgtggttctccaggggagagatcctggtctaacattattctgaacagttgatttctccagaatcctgtgtaggcaggcactctatctatatcctcaggatcactgagtacaggttatccgggctaagacacactttggggatgaatggaccaatgcctgtgcccctcccataggctactgggagctggtggaggatggactggactccaggtgtggcaacctgtatctccgcccacttttttttttttgagacggaggagtctagctctgtcattaggctaaagtgcaatggtgtgatcttggcttactgcaacccccgcctcctggtttcaagcgattcgattctcctgcctcagcctcccgagtagcggggattacaggcatgcgccaccactcccggctgatttttgtatttttagtagagatggggtttcaccatgttggctaggctggtctcgaactcctgacctcaggctatccaccctgctttggtctcccaaggtgctgggattacaggcttgagccaccacacctggcctcctcccacttttgtacatctctttcctgagccatttcctctggtcattcccatagttcctgttacaggtttgaaactgcctttgcaaaaattagaaggctgggcacggtggctcacgcctgtaattccagcactttgggaggctgaggcgggcagatcatgaggtcaggagttcaataccagcctgaccaacatggtgaaaccccgtctctactaaaaaaatacaaaatggccaggcgcagtggctaatgcctgcaatcccagcactttgggaggctgaggcgggcagatcacggggtcaggagatcgagaccattctggctaacgtggtgaaaccccgtctctactaaaaatacaaaaaattagccgggcatgttggcaggcgcctgtagacccagctactcatagtcccagctactctggaggctgaggcaagagaatggcatgaacctgggaggtggagcttgcagtgaaccaagatagcgccactgcactccagcctgggagacagaacaagactccgtctcaaaaaaaaaaaaatacaaaaattagctaggcggccgggcacggtggctcacacctataatcccagcactttggaaggccgaggtgggtggatcatgaggtcaggagatcgagaccatcctggctaacatggtgaaaccccgtctctgctaaaaatacaaaaaattagccgggagctgtggcgggcacctgtagtcccagctactcgggaggccgaggcgggagaatcgcttgaacccgggaggcggagcttgcggtgagctgagatcgcgccaccgcactccagcctgggccacagagcgagactccgtctcaaaaaaaaaaaacaaaaaaaattagctaggcatggtggcgcatgcctgtaatcccggctgctcgggaggctgaggcaggagaatcgcttgaacctgggaggcggaggttgtagtgagctgagatcgcgccattgcactccagcctgggtgacagagggagactccgtctcaaaaaaaaaaaaaaagagagagagatggaaaccatcgtggccaacatggtgaaaccccgtctctactaaaaataaaaaaattagcctggcctggtggtgtgtgcctgtaatcccagctactcgggaggctgaggcaggagaatcacttgagcccggagtcggaggttgcagtgagccaagatcacaccactgcactctagcctggtgacagatctagactccattaaaaaaaaaaattataacagaaaatgttgacagtgaaagagatctgacctagacgactccattttgcttctaacctccaagctgtccttgttcattcctgggctcaggccaaactaattttgggagtaacttagtttatagtttaactttgaaacaaagacggtaacagctttccccaaacaaactcctttcttgcctggggactagactgcctttgcaggactaacagattagcaaggagattagaaattatggttcatgctgggtgtggtggtggctcctagggaagctgaggcaagagaatcgtttgaacctgggaggcggaggttgcagtaagcggattgcgccgttgcactccagcctgggtgacaagagcgaatctccatctcaaaaaaaaaaaaaagagctgggatcggtggctcaggcttgtaatcctagcactttgggaggccaaggtgggaggacaacttgaggccaggagttctagatcagcctgggcaatatagtgagacccattatctacaaaaaatacacaaaaagtagctgggcccctgcttgagcccaggagttgaggctgcagtgagctcagatggtgccactccactacaacccggggaacagagcaagaccctatctctaaaaaaaaaaaaaaaacaggtcgagcacgttggctcatgcctgtaatcccagcactttgggaggccgaggtgggcggatcacaaggtcaggagatcgagaccatcctggctaatgtggtgaaaccccgtctctactaaaaatacgaaaaaattagccgggcgtggtggcgggtgcctgtagtcccagctactggaaaggctgaggcaggagaatggcgtgaacccaggaggtggagcttgcagtgagccgagatcgcaccactgcactgcagcctgggcgacagagcaagactctgtctcaaaaacaaacaaacaaaattctgctgagccgtggagggaagaaaaaaaaagagcacatgtggggtacaacatagttgctaaatgaatgcttctgtagaatgatgtctaatgtgtcctttatcaacccatcaagctcaatttcctccatcaccactatccttgccagtctcctctctgctcctccacatgacaaacttgagcaagctcttccatttgtcctgacatctgcctggatcacttttccccaatcctgctgctgcctacagctttgttctccattcctgctccttgccaaagtggcatacagtagatactcagtatgttgttgaatggatggatgggtggatgggtgggttggttgatgggtgggtggatgggtggatggggatggatgggtgggtggatgtttgtttttttcaactaacgttgatgggtggatgggtgggtgggtggatgggttagtgggtgggtggatggatgagtcggtgggtggatgggtggatgggtagatgggtagatggatggatggatggatggatggatggatgggttactgtatgggtggataggtggatggttggctggataggtggggtagatgtttgtttttttctttttttttttttttttttgagacggagtctcgctctgtcgcccaggctggagtgcagtggcgcaatctcggctcactgcaagctctgcctcccgggttcacgccattctcctgcctcagcctcccaagtagctgggactacaggcgcccgccactacgcccggctaattttttgtatttttagtagagacggggtttcaccgttttagccgggatggtctcgatctcctgacctcgtgatccgcccgcctcggcctcccaaagtgctgggattacaggcgtgagccaccgcgcccggccagatgtttgtttttttcaagaaacgttgtggatgggtgggtggatggatggatggatggatgatgggtggatagatcgatagatggatgggtggatggatggatgacagatgggtggatggatgaatgatagatgggtgtatgtttgtttttttcaacaaaccttgttgatgggtggatgggtagatggatggataaatggatggattcgtggatgggtgaatggatagatgggtgggtggataggtgggtgggtggatgggtgggtggctgtttgttttttgtttagttttgttttatttatttagttttttgagacagagtctcgctctgtcatcaggctggagtgcagtggtgcaatcttggctcactgcaacctccaactgccaggttcaagcgattctcctgcctcagcctcccgagtaactgggattacaggcacccgccaccaagcctggctaatttttgtatttttagtagagacggggtttcactgtgttagccaggatggtctcgatctcctgaccccatgatccacccgcctcaacctcccaaagggctgggattacaggcgtgagccaccgcgccctgccctgttttttttcaataaacgttgttgattggtgggtggatggatgggtgggtgggtggatggatgggttagtgggtgagtggatcggtggatgggtgaatggataggtaggtggatggatagatggaagagtgggtgaatggatgcatgagtggattggtggatggatggatgatgggtgggtagatgtatgtatgtatgaatggatgatttgatatgtggctgggtggatggggaggtggaaggatggatgaaaggatggataatttggggacaaggtaactgattcgggctggagctaggactgatgacaaatgtccccatctcctgccagagctcagggctccaggccaggatctttccagagagaagctgcccctactttgagcctggctagcactgctctctgctggtcaccctggaggttgcagccagcccaccaactcccagtgatggaagaatcagcactcttgtcaaaaccattcttcctttttcttttttcttttttttttttttgagacggagtctcgctctgtcgtccaggctggagtgcagtggcgcaatcgtggctcactgcaagctccgcctcccgggtacacgccattctcctgcctcagcctcccgagtagctgggactacaggcgcccgccaccaagccgggctaatttttttgtatttttagtagagatggtgtttcaccgtgttagccaggatggtctcaatctcctgacctcctgatccgcccacctcggcctcccagagtgctggcatgtcagccgtgagccaccgcgcccggcccattcttcctttttcatcaagttaaacattttttaaatgtccacccatacagaaaacaaaaggacaaagtcccaatatcatagaatttgtgttcaggtgggaggaggaggtggagaccaataataaacaaaatgctaggtagaaaacacagtgtgttggaaaataggggaaaagtccagcagagaagcgggcagggagtatgatgggtacttaattttttttttttttttttttttttttgagacagagtctcgctgtcacccaggctggagtgcaggggcacaatttcggctcactgcaacctccacctcctggatacaagtgattctcctgcctcagccttctgagtagctgggattacaggtgtgtgacacacccagctaattttttgttttttttggttttttttttgagatggagtctcactctgtcgcccaggctggagtgcagtggcgcaatctccactcactgcaacctctgcctcctgggttcaagctattctcctgcctcagcctccctgagtagatgggactacaggtatggcaaccacgcctggctaattttgtttttttatttttattttcatttatttgagagagttttgctcttgtcacccaggctggagtgcaatggcgcgatctcggctcactgcaacctccacctcctgggttcaagcaattctcctgcctcagcctccggaagtagctgggattacaggtgctcgccactacgcccggctaatttttgtacttttaatagagtcagggtttcaccatgttcgccaggatggtctccaactcctgacctcaggtgatccacccacctcagcctccggaagtgctgggaatgcaggcactggccgccccgcctggcctccttttgggttttaatggcagcttcattaaacagacatgactcacaatcataaagaaacgtaattgggccaaaaattagtatgatctcatatgaatagactgactggggagccaggcagggcctgtctgtccagatttgtcttggtctctctgtagcttttcttcctccagggtatggggcatgaccttctctggaatgaggtgtttgggctcccaatcagattagagtcctgccttgggcagtgaaaagggacagaaagtggagagagaaattctgtttccctagggcttcgcctgaggactaaagaacctataaataggatggggcgtggtggctcacgactgtattcccagcactttgggaggctgaagcaggcagatcacgaggtcaagagatcgagaccatcctggccaacatggtgaaaccctgtctctactaaaatacaaaaattagctgggcgtggtggcgagcgcctgtagtcccagctattcaggaagctgaggcaggagaatcgcttgaactagggaggtggaggttgcagtgagccaagattgagccactgcactccagccctggtgacagaatgagactgtctcaaaaaaaaaaaaagaaaaaaaaaaccataaataaataaataaatatttctgaggctggtgcagtggctcacacctgtaattccagcactttggggaggccaaggaaggcggatcacctgaggtcagtagtttgaggccagcctggccaacatggtgaaacccagtctctactaaaaatacaaaaattagctggaggtggtggtgggcagctgtaatcccagctactcgggaggctgaggcaggagaattgcttgaacccaggaggcagaggttgcagtgagctgagatcgcaccactgcattccagcctgggctacagagcaagactctatctcgggcgaggggaaagaaatcacaaggacgcccggaaactgtttagcactagcttgcaatgctaacgcacacatattctattacccagcgattcctctactgttcccgatagaaatgcatgaatacatcctccaaagatatggagccaccatgcccagcagttcccctccttttttttttttttttgagacggaatcttgctctgtctcccaggcttgagtgtaatggggcaatctcagctcactgcaacctccgccccctgggcggagccattctcctgcctcagcctccccaatagctgggattacaggtgcccacaaccatgcctgactaatttttgtatttttagtagaggtggaatttcaccatgttggccacgctggtctcaaactcctgacctcaagtgatctgtcctcctcggcctcccgaagtgctggggttataggcgtgaaccgctgtgcccggtccccccccccacttcttttttgagaccatgtttcgctcttttgcccagcctagagtgcagtggcgcaatctcagctcactgcaacctctgcctcctggactcatgtcattctcctgcctcagtctcccaagtggctggaattacaggtgccctccaccacgtctggctaattttttaatttttagtagagatgggctttcatcatgttggccaggctggtctcgaactcctgacctcatgtgatctgtccctttaggcctcccgaagtgctggaattactggtttgaaccactgcgcccatcctcccctccccctgcctttttttttttttttttttaagatgggtgtctgactatattgctctagctgtcctttatctcctgggctcaagcaattcttcctaaactctgggattttacaggtgtcagccatcctgccccaccaggatataagtcatttgtcagatatatgtattgtaaatatcttaccccagtttttttggtttgttttgtttttttgagacaagagtctcgctctgttgcccagagtacagtgcagtggcgcgatctcggctcactgcaacctctgcctcctgggttcaagagattcttctgcctcagcctcccaagtagctgggattacaggtgcatgccaccacgcccggctaatttttgtatttttagtagagatggggtttcaccatattggccaggctagtctcgaactcctgacctcatgatccacctgcctcggcctcccaaagtgctgggattacaggtgtgagccaccgcgcctggcccatcttaccccagtttttattgcgattactttctttctccctctcttttttttttagacggagtcttgctctgttgccaggctggagtgcagtggcgccatctcggctcactgcaacctctgccttctggtttcaagggattctcctgactcaccctcccgaatagctgggattacaggtgcccaccatcacacccagctagtttttgtatttttagtagagacagggtttcaccatgttggcctggctggtctcgaactcctgacctcaagtgatcttcccgcttacggcctctcaaagtgctgggattacaggcgtgagccaccacggctggccaagtttccagagcttttttttacaatctcaatgatgtatctcggaaggcagggactcagtatatctcatttaccgctgcatgcccagcaccccttaccatgcctggcacacaatgggccttcgacaaatgtttactgaacgaatgacaatgtcgtagtcctgtctctggcctcattttcttcctgtgggcatgttaatgtctgtcttgcccatttcacaggatgttgtgaggctgcgggaaccacaggatccgttcccccacccacccaggagttgggtttggaggctctcaggccgcgtcagctattacattcaggaaaggcggagctccagtcttcctcgggaacttgccggctaagctccacgtgggcgccccgcccacatccagccacgctcacacctgtcagctggtgggagggtcaggaccagcctctaaggggcgtggctagggctcagaactaggaagaaggcggagttccggaggccactgaccaatgagagcgcaagttttggggccggaaaaggcggggccgcgcgcaggagaaagaggtgccacatttccattggactacctgtcgtcgtcagggaaacgcagcgtctccctgccggggaggtggcggggcggggctttctgggaggcggggcttccggggccggctcggctgggaccgggcgctcgtcgtcagctgacccgccgccatcttgtccgccatttgcaaggggcccggagcgggatcgcggcacctgccgagcgggtcgccgcctctgccgcggtccttggaccccgccgccgccctggcctgggagcttgccccgccgcagcggccggcagcgcggcgctccgcgggcggcaggcacgggccccgggccccctcacggcgcccagccgcgggcctcccgaggcaaaagcccgtgggccgccgcgatggccctcaagatggtgaagggcagcatcgaccgcatgttcgacaagaatctgcaggacttggtccgcggcatccgtaaccacaaggaggacgaggtgagcccggcgcgccaaggggctgctcggcctggtcacagccccggcccagggcccagccctgctcactgggcctgctcggcctgccgcccgcccgggctctgtcttagttggaggtcccgcttagggctccggccctgcctggcctgggcctggggcgccgcccacctcctcggtcccccagcatcagtttccccacgaggggcgaaggccttggagcagcacatctcggatcctcgcctcatcggatcacctgggggaagcgctgttcaaaatgcaatgccctgggccccgcctataggtgccctccccctggaccctcagtttactctctcagagggagattcgggcccacctgcccccgtctcgggccaccctcccaggagacttgcgaggtctctgggcagagcttcttcaacctgagtgtgtttccgaatcaccgattaaaaatgcaggggcccgggccccgcccccggaccctccccgggagaccgaggcagggggtcctgggccgtccctggagaaactccttcttccttctgggtcgtgtaaatgcgtgtccaggtcgctccctgaggcctggctcggaaccaggcagggtcttggggcgttgcctccagtgcccccgttcccaggaaggtggggctgctgccaggagggaggaaggacagcggcatcctgatccccagtgaggtagcagcttgcgggaagctggaatggggaagctgacttcaagtaggaacctgaaagccagggcgaggaaatagttttccagaagtaaaattacaaccgtggggatcgtttccttcccgctcctcccttcccccaacctgtgacctagattgaagaagaatgggcagagtggccaccacgtgtctggcttcattaaggatacccgtgcagcccttgggcagtgggagccttagaaagtgtcctacttgagcgactgcctgcctgcttccctgcgtggacagcaaggcaggcctgaaagagagccgccgtctgataccgcaccagtcccagtaccagaggctgtgtccaggacgaggtgcccaggagggcagggaagttaagggacttgcttcctggcaccatgtccctcagcccatgtccctctctctgggaacccgagctcttgccgtattgttacacctttacactttcctggaagtggtgtggcttcgcctgcccccaccttaatgaggtcatttttgttcttctccaccccacttcccttcggcctccttggttttcttcatctcagaagctctccctaactgctttggttacaacgtgtaactaactggagtaatgttcagattctttgtgagttgaaagcatcgctgatgggcctggtttttactgagcttggttcagattggaaatgtggttcacttcccgagaggactttttctgcacaggcaggatctcccagcgcccgtccctgctcccttcagcgcatgtcactgagcagcctgttctgggaccctgacgatgggccagggggtctgtccagtggaggaccacacctctagtctggggcatggttttcagggggatgtgcctgtcttcactgggaagcccctgagcctggttttcttcctttggaattggtgtgagttgatagcgccttccccacaagtctgggccccttcaagggggtcttggtggtggaaactttttttttttttttttgagacggagtttcactcttgttgcccaggccggagtgcagaggcatgatcttggctcaccacaaccttcacctcccaggttcaagcgattctcctgccccagctcctgagtagctgggattacaggcatgcaccaccacacccagctaattttgtatttttagtagagacagggtttcaccatgttggtcgggctggtctcaaactcctgacctcagtgatccacccgccttagcctcccagagtgttagaattacaggcgtgagccactgcacccggctgggaaacatttttaaaacggcgcagggttgtccttgaaagtcccaggcttcctcattggccctgccattggcgggtgggtgatttcaggcaggacacgcagtgtctggggaccctggctttctcactggaagacgattgttatggtccagagggtggtaactcaggtgttcatgtctgattctggatgttctctgcagctgctggagtctcctgattggagagcagcaaatgactgttcaatgacagttctagttgtacctccagcacccccactcactttgaaaaagcagctatcctatagaccgtatgttgtaggttcttccctcccgcccactgcacccggaacaaagactctagacagtgtgcgcattttctgcagcagtatagtttccaaaaaaagtttccatttcgtaatagattttcacctaaaacttgagtgtggcatcatggaaacaaggcttagcaatgactttgaaagccacgtggaaaggcagtgcgatggagtagaaatcgcatgaggtttgggagatccgagtccaggtgcttgggctgactggctgacttcatggggcggcccatctagagccccctgctctgtctcctcccttgtaaatggggatgacagtcacctccctccttgctggatgatgcggaggatgctgcagtgacacgcggttttctggaagcgccagagcgctgaggttgtctagttcactgttttccagtcctcaggctgtgacctctttgtgggttgtgaattcaatttaatggttatgctaggtaagaaaaaggaaaagaaactagaagagaccagagtgcaggcacatacagtaaccgtcctgtcctgaaactttgatttctgcatgtgatacttgtgtgtacgtgtaaacgtatcgggttcccatgcaaaacctattaagatgagtccaaaaagcgtgagaagtagtggtctcatgtgtatgtgtcttggtccacttgggagtgtcctcagcttctaaagctcgatagaattggcacaaaaaacaaacgacttttaatattttgttctcacaagtccttttcatagttttgggaaagttttctccattttttctttttctttttttttttttttttgagacggagtcttgctctgtcccccaggctgcagtgcagtggtgcgatctgggctcactgcaagctgtgcctcccgggttcacgccattctcctgcctcagcctcccgccaccacgcccgtctaattttttgtatttttagtagagatgggctttcaccgtggtctcaatctcctgtcctcgtgatcctcccgcctcggcctcccaaagtgctggattacaggtgtgagccacggtgcccagcctttttttctttttttttttgagactaagtctcgctctgtcgccaggctggagtgcagtggcacgatctcggctcactgcaacctccacctcccaggttcaagtgactcaacctcccaagcagctgggacaacaggcgagtgccaccacatccagctaatttttgtatttttagtagagatggggtttccccatgttggccagtatggtctcaatctcttgacctcgtgatctgcccacctttgcctcccaaagtgctgggattacagggtgagccactgtgcccagcccatatattctttttcttttttcttttttgttttttttttcttcttcttgttttttttccaagtcagagtctcgctgtgttgcccaggctggagtgcagtggcacaatcttggctcactgcaagttccgcctcctgggttcaagcagttctccctgcctcagcctccccagcggactccaactaaaaaaaaaaaaaaaagaaaggaaaagatataaagagattaaatttgaactgagtgtgttttcttttcttttttttttttttttttgagacagagttttgctcttgttgcccaggctggagtgcaatggcgcgatctcggctcaccgcaacctccgcctcccaggttcaagcaattctcctgcctcagcctccctagtagctgggattacaggcatgtgccaccaccccggctaattttttgtatttttagtagagacggggtttctccatgttggtcaggctggtcttgaactcccgacctcaggtgatccaccagcctcggcctcccaaagagctgggatgacaggcgtgagccaccacgcccagccgaactgagcgggttttctctccttttaataacgtcagtcattccactagatcagcgtctgcccctcaccactgtggatgttggggctggatcattctctgggtagagctattctgggcactacagggtgctgagcagcatccccgcccccacccactccgtgccaggggctcctctggtcatgccagccacaggtgtgcccagaccagaatgtctcttggaggtagaatcaaccccaaattaaaagcccctgaccccccttgatggtaagaaaagtctcccagaattcccgaatgcgtccctgttgtccaggtgccctcgtcccccgtgctgtcacggtggtggtggaccagagggcgtggattctaaatgtgctttgttttccctctgagctgctttgattgcaaaatatgcagtgcataggacattgtacggcttttttttttttttttttttgagacagggtcttgctccgtctgtcacccaggctggaatgcagcggcacaatcttggctcactgcaacctctgcctcctgggttcaagtgattctcctgcctcagcctccgaagtagctgggattacaggtggccgccatcacacctggctaatttttgtatttttagcagagacggggtttcactgtatcggccaggctggtctcaaactcctgacctcaagtaacccacccaccttggcctcccaaagtgctgggatggcaggcgtgagccagtgtgcccggcctgtacagctaattattatggtaatgatcctgacttctgtaagtttaatttccttgacttgcttgtagttttatcacttaaatttgtgtccctgaaccataggcgtgattgcctaaggtgtgtgtgctttgcagccgtcatggtggggagggagctgtcctcggtccttgacgtgggtggctgtgctctgttgtttacacacagcttccatacatagtcggacatgtgggtggtttccatgtggggtcgttttatgaatggactcaagccgtagaggccctcaggaaagcgcccgctccccacagagcttctcccagcagcaagcatgaaagccgcagcctcgcctcccgcaccaccagcagggctggggtgtttggggggtgcagctgtagtgtcagctgccctgcttatgagtgcggttcactcattcacaggcgtttagccgcttgcgttcttcctgaagctctctcttcaaagaggcttgggcctctttgtctattttactcctttgcaggggttttcaaaaggcaatctctgggcagaaggcttggtgtgtgtgtgtggaggtggcttcaaggccgaggcatgtgggtcctggaggggcatgtgggtgggggtgagttctgcccttgtaaccagcttctgggtgatgctcacttgcgttgagctttggagagccaggaagaccagagggcaggagcggcgacgccagccctgggtgtgctctggcccagccgtggcactgtggacatcaggctggattgttcttggggtgggggtgttggggcactgcagggcactgagcagcgtacccggcctccacccactccatgcctagatctctgcaagtcgtggcaaccacagatgctgcatacatcgcccagtgtcccctggaggggcagagtcacctgctgggaaccactgccttaggagttcttggactggctggtggctgatttgtccacgtggcagtgagacaggcggagggatgtggggaccccgggtggcctgctgggcatccaccatgtggcccactctgtgctgagtggtccctaatgctcctgctcatctgtgactggggcctgaggaccctcctctgctctgcccaggcctccagccctcagggagctgcggtccagatggagcctcacgtccttcctggtgttttgtcctgtcctgtgatgctgctgagccaaggtggttcctttctttgaacagttgagatataatttacatgccacaaaatctgcctgttctaggcatgaaatgaagtagatttcagtatatttacaaacgtgcagtgattcagcacaatacgttcagaacagagaaacctatgccctggcgaccactgacctgctgtctctgtggatttgagccagaagcgtttttgttttgtttgtttgtttgtttgtttttggagacatagtctccctctgtcgcccaggctggagtgcagtggtgcgatcttggctcactgcagcctcttcctcccaggttcaagcaattctcctgcctcagcctcctgagtagctgggattacaggcatgcaccaccataccaagctaatttttgtatttttagtggagacggtgtttcaccatgttgaccaagctggtctcaaacccctgacctcaagtgatctgctcggcctcccaaagtgctgggattacaggtgtgagccattgtgccccgccttgactcagagggttttaatggtgaccgtgccaccccacagacatccaggctgagctgaggggccgcaagttacaggactgagcacagagacgggctggggctggactaggcagggctggccggggtctggtcctggatggggctgtttctggtttctgccctgttgcgtgttagtgtgctgcaccagcctcagttgtgggagtggaggtaggtcccggtgtgggggcctcggttccatgctgcctcagggtggccgcggccgctctgctcctgggtgcagagggcgttgagcctgtccacaacaagagaataaagcaggacggtgtcccgggctgttgaaagagcagagcgctccgcaggagaagctcctttcatgctgcttctggggttctggggtttggtggcttttctgtttgaattcgaagtgatggtgattgtggatagtaacttatcctgggcaggatggaccacttcgccggcgcgtcccctttcctgactcagttactgttgggacttggaattctttttttttttttttgagacggagtttcactcttgttgcccaggctgaagtgcaatggcgcgatctcggctcaccgcaacgtctgcctcccgggtgcaagcgattctcttgcctcagcctcccgagtagctgggattacaggtgcgagccaccaccccggctaattttgtatttttagcggagatggggtttctccacgttggtcagactggtctcgaactcccaacctcaggcgatgcacccgcctcggcctcccaaagtgctgggattacaggcgtgagccaccgcacctggccgaggcagcactttcatttatttccttttttattttttttttgaggcagtcttgctctgttgcccaggctggagtgcagtggtgcgatcgcggccccctacagcattgacttcctgggcttaatcaatcctcttacctcaaccttgcaagtagctgtgactacacgatgtgccaccacgcccagctaattttttattttttgatttttttgaaacagggcttcaaaaacctcctctctacacaaaaatacaaaaattaggcaggcttggcctggcacggtggctcacgcctgtaatcccagcactttgagaggccaaggtgggcggatcacaaggtcaggagatcgagaccatcctggctaacacggcgaaatcccgtctctactaaaaatacaaaaaattagccaggcatggtcgcgggcgcctgtagtcccagctacttgggaggctgaggcaggagaatggcatgaacccaggaggtggagcttgcagtgagctgagatcgcgctgctgcactccagcctgggcgacagagcaggactctgtctcaaaaaaaaaaaaaaaaaaaaaaaaaaaattaggcaggcatggtggcacgtgcctgtagtcctagctgcttggaaagctgaggcaggagaatcacttcaacctgggaggtggagtttgcagtgagcagagatcataccactgcactccaacttggacgatagagtgagactccatctcagaaaaaaaagaaaaagaggctgggcgtggtggctcactcctgtaatccccgcactttgggaggccgaggtgggcagatcacctgaggtcgggagttcgagatcagcctggccaacatggagaaaccctgtctctactaaaaatataaaattagcttggcgtggtggctcgtgcctgtaatcccagctacttgggaggctgagacaggagaatcacacttgagcttgggaggcggaggttgtggtgagccaagatcacaccattgtactccagcctgggcaacaagagtgaaactctgtctcaaataaaaaaagaaaaaaaaaaaacagaaaaaacccctcagagcccccattggggtgagggggaccgggctttgctctcatgagctgggtgagctcccaggccctcagcctgcatgcggctcagcggcccggctcccctcagccaggcggccacgtggaaagcaccgtgggatgtgccaagggctcagctcgttggtctttgaactggacagcacctgagaatcagctgctgaggttgtgaccatgtggcctccctggtctcaagatgctgacttaattcattggaggcgaaggactgagaatcggaagtttaaaactagaaaaagcgccagccaggtgcggtggctcacacctttaatcccagcactgtgggaggccaaggtgggaggatcacttgaggccaggagttcaagaccagcctgggcaacatagtgagaccccaactctacaaaagtaaaaaatgttaggtcgggtgcagtagctcacacctgtaaatcccagcactttgggaggctgaggctggcgaattacttgaggtcaggagttcaagaccagcctggccaacatggctaaaccccctctaaaaatatagaaattagccaggcgtggtagtacctgcttgtaaccccagctactgggaaggctgaggcaggagaattgcttgaacccgggaggcggaggttacagtgagccgagatcacaccactgcactccagcatgggcgacgagcaaaactctgtctcaaaagatacatatatatatataaataaacatatatgtaaataaatgtatatatatgtaaacaagtatatacataaatatatgcaaaaataaatatatataaatatatataattttaaaaattcgcccaatatggtggcatggccctgtaatcccagctatttactgtactcccaaatactgaggtgggagaatctcttgagcctgggaggttgaggctgcagttagccatggttaggccactgcactttagcctgtgcaatagaggaagaccctatctcaataaaagaaaaaaaaaaggccgggcatggtggctcacgcctgtaatcccagcactttggtaggctgagacaggtggatcatgaggtcaagagatcgagaccgtcatggccaaaatggtgaaatcctgtctctgctaaaaatgcaaaaattagctgggcgtggtggtgtgtacctgtaatcgtagccactcgggaggctgaggcaggagaatcacttgaatcacttgaaccgagaggcggaggttgcagtgagccgagatcgtaccactgcactccagcctggtgacagagcaagactccattaaaaaaaaaaaaaaaaaagtaccccagggagttttcctgtgtatctagggtttaaatggcctgtcttactgcagtcctgaggacttagtgtataaaggaaatacgcaccctgtgttctaaattacatcccagaattaaatagatgctgagaccagcatcattgttttagtatctcacttgctgtgtggtgaagtgtgaatttagtgtggaactagctgaggtgtttgagaaatttcaccatgttgctcctctgatttcccggtgtttttgtagaaagtgtcaatgatgtatagccacattatagcttcagctaatttacatctatgtttataatataatcttttgggtctaggtcatgtctccctaccccaactaatacattttttttctaattcaggccgggcgcagtggctcatgcctgttatcctggcactttgggaggctgaggcgagcagatcacctgaggtcaggaattcgagaccagcctggccaacgtggcgaaaccccgtctctaccaaaaatacaagaattagctgggcatggtggtgtgcccctgtaatcctagctactcaggaggctgagccaggagaatcacttgaacctgggaggtgaaggttgcagtgagccgagattgtgccactgcactccagcctggcatcagagcgagactccgtctcaaaaaaaaaaaaaaaaaaaaaagacgtttgtgtgaggcttggtctgagaggagctacttggactttatcagaagttaaaagccaagagggagtcccagggttgtgacccactgccgagttcctagaaagctgactagtggctgggcgtggtggcgcacacctgtggtcccagtgctttgggaggctagcggggaggatcacttgagtctggggtgtggaggctgcagtgagcagtgatctcaccactgcactccagcctgggcgacagagtgagaccctgtctcaaaaaaaaaaaaaagtcaagcaagttgactggagcagacccaccacatggtgtgtatccattcatcagcggcgagcgtgggggctgttcctgtttcaggccactagaaatggtgctgccatgtgtgttcgtgtgcttgtttttgtttggacacctgttttccatcccctcgggtgcacgcccagaagtggaattgctggggcggtaactccacatggaaccgtggaggaaccccaggctgctttccacagcagccgcgccgtttgacatcccctttgccctcgtgagggtctgacctctccacgcctgggatggtctttttgttcttttccttttaaatcaacagtcctgaccctttgagcaggaggagtgggttatccttgctccggggatgggagcacagtcctggggtgaggtgtagtaatttgaagcccgtctggaggatcgggtggcactctttccattgtacaaagttggatcataaagcatggaggaaaatattatgtgtctgtgccctcccccacccccccactcccccacagctgtgtctccttccccagcccggtgcagctggcagccgaggttggggtgtggtcctgggtgacacatgagtggtgggtactcctggggctgcttcgaggccagctacagtggggctgaggacagaagcgtgatggggtgggcttgccatccttgcctctggtgggcacagcaggaggaacattgcatcccgacgtaggggctggcaggacggggcccgggcagccgtcactcctgacctgtcggatgatggagaggggctcctgtgcattaggagggcttgtgggtgcctcatcgttcactgatggaggcactccaagcctctgctgctccctcctctccttccaggtggggtgggttgtctctggggccagcatggcatcgactcggcttgtctctggtgctatgttgggcgcctcacgtctgcctgtcccttgggaaccttgtctgccattctggacctcgtgcctgagttcgcttgggtcagaattgtccttgatggtgttctggagacacgcgcagttagtgagcaggcccagggggatccagacacaccagacacatcccctcaaaacctgagtgtggttttcacagcagtgagagtcaccctggctgaaggtgggaaggccccacatgttcgtccaccaaggagttggcaaacggtggggcgtgtatagcggaatgctgtgcgccaccaccacggccaagttccagaacattatcagcctagaaagaaagcgaaccctcccgtctcctctcccagcctgtggcacccacgaatccccttcctgtctctggattggcctgatctggacatttcatagaaatggattacacggtgtgctctctcttatgcctggcttctttcctttttttttttttttttttttttttgagacggagtctggctctctcacctgggctggaatgcagtggtgtcatcttggctcagtgcaacctctgcctcccaggtttaaacgattctcctgccttagcctcctgagtagctgggattacaggcgcccgccaccacgcccagctaatttttgtatttttagtagaggcggggtttcaccatgttggccaggatgatctcaaactcccaacctcgtgatctgcctgcctcggcctcccaaagtgctgggattacaggcgtgagccactgtgcctggcccgaaatcattattccagccctcttagctggatgtttgtaatctctgtgtttatcccccattataggcaaaatacatatctcagtgcattgatgagatcaagcaggagctgaagcaggacaacatagcggtgaaggcgaacgcggtctgcaagctgacgtatgtaagtgcctcccagtggccagcgcccagcactgtcgggctgcttctccactcagcacgtgtcccctattcatcagcctgtctgtccacctgtcagtcattggtaccacctgctgtcggtgagccactcagggccaacccagagtcctggagcagaaagccatgttggtcacatggctggcaaacaggccagagggtggcaacccacaggccctggtggtagccctgagggagccccatggggtcctcttctgggtgggattcactggggacgcccctcgcctgcagtctcggctccctcccaccacaggctgggccaggacacctagtggggagagctagggccctggaccttccagggctggctcctttcctggctgcagttccaggtcagtgcgtgagctggggacaggcactcctccctctggcccgtttccccgtgggaggacgagacaaagggctcgtccagggtcccccatgctgctgctcgtctcgtaactatttcaaggagccgattcgccaagggttggtaggggaatgtagccagtacccgtaagcgccagttaaccaattgcagacattgagtctctttttagtgcctgttactaacttgtccctgtagcttttaaatgtcagagtcgtttgtcaaaagaagaaattaaaggccccaggggtacgtattgggtggtttgctgacagtgaatgagtctgttccagcaccgtgtgctgggagggagcgcttgatgccgcggctcaaaacctttctctctgctttggcttgtgagtgcaatttcctgtgcgtcccttaacagttacagatgttgggatacgacatcagctgggccgccttcaacatcatagaagtgatgagtgcctccaagttcaccttcaaggtgaggttctgggacggcaaggctggtggggtggggagtgattacaggtgtgaggcaccgtgactggccaatttttattattattattcttgagacagagtctagctctgttacccaaggtggattcagtggcctgtaatcccagcactttgggaggctgagacaggcggatcacctgaggttgggagttggagaccaggctggccaacatggtgaaaccccatctctactaaaaatacaaaatttagtggggcgtggtggcgcacgcggctataatcctagctacttgggaggctcagacaggagaattgcttgaacccgggaggtggaagttgcagtgagctgagatcgtgccattgcactccagcctgggcaacagagcgagactttgtctccaagaaaaaaaaaaaaacacatacatattccaaactgggaatttcctcatggaattttgaagaaatctgcgttggttttcaaatgcgggttggttcccacttgctggtggccccagcgtccaggctgcagggtgttgcttctgggctggcgctgcctggtgtggtcgctgcagagcagagctggagctcctggaggctgcgggtgtcctgcctctgatgtgctcatctgttctctcccagcgaattggctacctcgctgcttcccagagctttcacgaaggcaccgacgtcatcatgctgaccaccaatcagatccgtaaggtgggtgttcccgggccggggccgctctgtgctgagtgcagtctgcccttgccggagcgtctggttcccacacgcgtcttcctgtgggcagcaggtgcctgtggcccccttgagtgcgagcggggcttccggagccacagtcctcccagcagacgcagagaggaggcccggcgggtctgagcctgcgctccctggtgggcttgtgaggtggagggatgctgagtggtgcggtgcccccttccctcgctcaccacctggaggggccggcgaatggggctccagggtccactcgcagctggcctctgcggtcacccactttcttcccttctcccctcatggtagtgcctggtgtagctgtgggcccttccctgcccatgtggggtgcttcctgcccgcggctttttttgagtcccacgaggtgcatttttcagcaccatgtaaatgttgcattttgaaatggtcacggaggccactgggtagtagtaaaggtccttattggccccgagctctgaacacctttggttcccgcctctcaatagaggggttggggtgttggagaatcaggcccacccttttcatgggcagctggcccctttctggccccagaccgcacgtcagaggccacggtcccggctctccaatgtccatgtgcaagggcgggaccctgtggctgtgttgtcgaccccacagtgtgacctgaagtcctgggctgggggctcccagcacgccgagggacaggtgtgggggcactggctgtgactgatgtccggcacagggtgtggtgcaggtcctgggactgttggctctgctgggctcaccgttgtgggcaaggttatagagctgggcgtcccgcctgggccgcgggcgacatgcgccctagatgccgtggggctcttgggtcatggccatgtagcaggagggacctgggcgggagtcttcttgggtcgtggccgtgtagcgggaggggcctgggcgggagtcttcttgggtcgtggccgtgtagcgggaggggcctgggcgggagtctccttgggtcgtggccgtgtagcaggtggggcctgggcgggagtctggcccgctaagaggaggatgggggcgggttttgcaggtggtaactgggagggaggagggtggagggctccagccgccctaggtacccaggtggcagctgcccagcaaggagggccacgtgtcgtgcccagctttgtgtctcttgctgatgggctcggcacggccggtccctgtgtgagcacctcactggggacttagatccgccgctgccttgcgaggtgctcagggctgttagaccctgtgtgtcgggcgcggctctgacctggtgcctgcccctggcctggcctcggacgcaggtgggccctggctcagccagttagcacctgcttcctctgtgtaggatcacgtgcttccgatgtttgcagtccagtgtgtcatttgtttgttttgttttgttttgttttgagactgagtctcactctattgcccaggctggagagcagtggcgtgatgtcggctcaccgcaacctctgcctcctgggttcaagcgattctactgcctcagcctcccgagtagctggaattacaggtgcccgccaccatgcctggctaatttttgtatttttagtagagatggggtttcaccatgttggccaggctggtcttgaactcccagcctcaagtgatctgcccgccttggcttcccaaagtgctgggattacaggcatgagccactgtgcctggcctcattttgttttttattttatttttttgttttgttttgttttattttgtttttgagatggagtcttgctctgtcgtccaggctggagtgcaatggcgtgatcttggctcactgcaacctctgcctcccaggttcaagcaattctcctgcgtcagcctcccaagtagctgggagtacacgcatgtgccaccacacccggctaatttttttgtgtttttaatagagacagggtttcaccatgttggccaggctggtctggaactcctgacctcaggtgatctgcccacctcagcctcaccaagtgctgggattactgcgcctggcttgttttttaataaaaaaaattatttcctgggccgggtgcggtggctcatgcctgtaatcccagcattttgggaagctgaggcgggtggatcttctgaggttgggagtttgagactagcctgaccaacatggtgaaaccccgtctgtactaaaaatacaaaattagccgggcgtggtggtgcgtgcctataatcccagctactcaggaggctgaggcaggagaattgtttgaacccaggaggcggaggttgtggtgagccaagattgtgccattgcactccagcctgggtgacagagcgagactccgtctcaaaaaaaaaaaattattttctttcttttttttttttagggtatttttagtacagacaggatttcaccatgttggtcaggctagtcttgaactcctgacctcatgatctgcctgcctcggcctcccaaagtgctggaattaaaggcgtgagccaccacgcccagccctaaaaaaaattattttcttacttttttttttttgagacagggttttgctctgtcacccaggctggagagcagtagcgcaattgcagctcactgcagcctcgacctcctaggctcaagcgatctccccaccttagcctcctgagtagctgggactgcaggcatacaccaccacacctggctgattttttttgtattttttgtagaggcagggagggtttcactgcgttgcctaggctggtctcaaacccctgggctcaagtgatcctcctgcttcggccttccaaagtggtaggattagaagtgtgtgccaccacttcagctcactgtgttattttattttattttatttattttttgagacagagtctcactctgtcgccatctggagtacaatgtcggctcactgcaacctctgcctcctgggttcaagcaattctcctgcctcagcctctcaagtagctggaactacaagtgtgcaccaccgtgtccgactaattttttttattttaggagagacagggtttcaccatgttggtcaggatggtctcgatctcctgacctcgtgatcttcccgcctcagactcccaaagtgctgggattacaggcgtgagccaccgcgcacggccactgtgtccttttaaaagaaccagttggccccgcactgtggctcacgcctgtaatcccagcactttgggaggccatggcgggcggatcatgagatcaagagttcaagaccagcctggccaacatggtaaaaccccatctgtactaaaaatacaaaaattagccaggcgtggtgacacgcacctgtaatcccagctacttgggaggctgaggcagagaattgcttgaacttgggaggtggaggttgcagtgagctgagatcgcaccactgcattccagcctgggggacagagtgagactcgtctcaaaaaaaaaaaagctggccttgtcatattttgaccacagaatattaaccctgaaaacagatcttggtagatgcatatatagatgaagtctcgggagtttccttaagaagatctctccccaagagcaggtttgtgatatcaagagaggatttatttccccaagtgctgacacaggagctggggcagattccctgttttagtgagagctgcgggagtgaagagctggggcagagttcatgggagggcgtgggcagctgccagctgaactttgagagggacccatgggagctgttcctgggcccttcccctcagttgttgcggaaagggaccccaaatgggagcagggtctctgaggaccccatcctgtggggctttcctgcccattctgtgccaggcccagcaccgccgtctctgcaagctgggagctgccagtgatacgtgagggaagccctggttttaggcctggaacgctctgctcttgcacccggggtggcccttccccacacttggagtgacttgtgacaggcgcctctgtcccaggaggtgccaggaaactcggttgattcccacgcagagtgcttcagcctgtgcctcagacctctctgtccccagccctgcccatccaggaggagccaagaaacttggttgattcccacccacagagcgtttcagcctgtgcctcagacctcactgttcccagccgcgcccatcccggctcctctcttggtgacagagtctcccatgggctgtaaattcttcctccttgtccgagttcagcttcagacccctcagcagcaggggtgctaaggcacagctgcaccccaagaggatatgccgagtcctggggcatcctgggagaatttcgctcctgctgctcctggtgacccaggcgtcggatgtgccacccagggcatcctggccacggcccctttctctcactttccaggacttgagcagccccagccagtacgacacaggtgttgcactgacgggtctgtcctgcttcgtcaccccagaccttgccagagacctggcaaatgacatcatgacactggtgagtttgtaagcctgcccaccacccctgcatgtctgctctgggaaaaactcggtcaaagtggcatgcctgggaagcttggctatgcggaaaccggccggggtccccggtgcgtggcctgcctgaaatgggaaccaaatcactgtcagctggtggagcggctcttgggccgctttggttcctgcgtgtcttaagttgatatttgaaatcatcttgccgagaggagcaacagggtgtccctgacaggccaggcacggtgggggatgtttgccctgaggtctgacagtggctcctgtctgagctgccagtgggcttctgtgtggtcctctttcctccatccctggccacagcttgactcctccttgccactctgcttgtcaaaggctacgcccccggctgtgacagtctaaaacctgggaagcccctggaaattttggccccagaaacatctgttttgtgcctgacttaacctccagctcatgaggggacctttgttccttttcatttaaaacacagtagccagattaacagtgtggagcgggcatgctttcctccctgggaagcactgtcctcacatggctgcctgtccgcccggaggtgtctagatcgtggccgatgggcgctgtccccgcgtggctgcctgtccgcccggaggtgtctagatcgtggccgatgggcgtggtccccgtgtggctgcctgtccgcccggaggtgtctagatcgtggccgatgggcgcggtccccgtgtggctgcctgtccgcccggaggtgtctagatcgtggccgatgggcgcagtccccgcgtggctgcctgtccgcctggaggtgtctagatcgtggccgatgggcgctgtccccgcgtggctgcctgtccacctggtgtctagatcgtggccgatgggcgctgtccccgcgtggctgcctgtccaccgggtgcctagatcgtggccgatgggccctgtcccctcgtggctgcctgtccaccgggtgtctagatcgtggccgatgggccctgtcccctcgtggctgcctgtccacccggtgtctagatcgtggccgatgggcgctgtccccgcgtggctgcctgtccacctggtgtctagatcgtggccgatgggcactgtccccacgtggctgcctgtccacctggtgtctagatcgtggccgatgggcgccgtccccatgtggctgcctgtccacctggaggtgtctagatcgtggctgatggtcttggagattgtcagcacagcctgctaagcttctagatcagggatcagcaggctgcggcacagggccaaatccagccggctgcaccttctttccacgtgttgtgttgtctctggtggccttggttgtgaaggcacagctgtgtggtcatgacagaggctgtctggcccatgaagctgaaaacactgactgctggccttcacagagtgccggctcctctagagtaaagcagtggggagcccacgagagggtggatgtcagtgccccatcatggattggctctgtcaggaccaggcagttcgaggcgactccctgggcctgttagatgggagggctcccgctggggaatttgagcagtcgcagggcacagccgtgaggagctgggctgtaggctgtgttcccagcacaccctcgttccctgtgtgactttcctctccagccttcctcccactgtgggacccaggaccctggggcaggaaggccacaagggaagagggctctctctggagggcaggcctgagtcaggggcacagtgaggctggcttccatgccatccaagatgctggtctgtggcccctgggactggtgtgcagccacagcgtcgggctggagggcatctcctctctgtggaggaggcggctgggaggggcgagagcagggatgaggcgcagaaagcccgcgcaggctgaagcccgctgccccgcagatgtcacacaccaagccctacatcaggaagaaggctgtgctgatcatgtacaaggtgttcctgaagtaccccgagtcgctgcgccctgcctttccccggctgaaggagaagctggaggaccccgaccccggtttgtggatttgagttaagcctcagggttgagggtgggggctcagccggtgccctgggaagaggtggtggcgtgttttggggggtgctgcggggagtggtgaagggctcagtccaggaacatgcctgttggaggtggctgggcctccccttgctggggcagccaggagggaggtgctggtggtgggggcagtaagatccaatgtggcagctggcggtgagtctggcgtgtccctgagcagaggtgtacccacccccgccagcccctcttaggaccagtgccaccaggaggcaccttccacagggcaggggatggtctagaccatatgtcccgtgcaggagctgcctccacctagtgtagctgttgtgtatttgtggtgtggtgactgcgggacgcggctgcagattcagtttcactgagtttccctgggctggtgtgtgaagcctctggcgtgtggcaggcgtgggtcggtggaccccaaagccagcccacaggaatcccaaggccctgtgtgcaggaggggagaccccagccctaagcccgggacccgatgggcgagcttctccctggagtggtgggcatggatgcagcaggaagactccctgagccccgatggctgggcagctgtttctggagccctcatgctgaaacccccactcagagggccgctgtcaggctgtcctgagcttggtgacgcttgtgcgcacttgttcctggcaacagtgccgagcaatgctttctcagcgccaggagctggctgctgtggcctgttccctggaggatcaggtctgtggctgctgtccctgtcaccaggaggaggtggcagagccagggccatgttcagtgggagctgctgcaggccccagaacttcctcgcgggccaggaagacagtaggatggttttctaggtggaaggacaggcatgctgatgagaaccccttgttccccaggggttcagtcggctgccgtcaatgtcatctgcgagctggccagacgcaaccctaagaactacctgtccctggccccgctctttttcaagctgatgacgtcctccaccaacaactgggtcctcatcaagatcatcaagctggcaagtactgcccgggaatgtggcctcctcaccctgtgtggggcattccctcaccctgtgtggggcattccctgcgggtgaccgaggccccccctgtccctcaccctgcgtggggcattccctgcgggtgaccgaggccctgctgtccccacagttcggtgctcttactcctttggaaccgcggctgggcaagaagctgatcgagcccctcaccaatctcatccacaggtgagtgcaggccatgcgcggtgggggcgggccggctccacggggtgcagtgtcggagcggcgggggcgggccggctccacggggtgcagtgtcggagctgtggggcgggccggctccacggggtgcagtgtcggagctgtggggcgggccggctccacggggtgcagtgctggagtggctgcaagcccggccccagtgcggtacagcgggggctgggcgtgaagcagctgaaagatgactgtccgtcctagactggaagcctgtagtggcattcccggccactagactcttctccatgctgcttagagacgtttggggagtttgggttttctttgtgggtctccgcactgcaaggttgtggaatgggatcctatgttaggagccttttcaggccaggctgcctttggttgctagaaggggacactttaattcctcagaccaagtgctgaggcggagccaggacccctccccggcccccactgcagggaaggggaggggtgcagtgggccgcaggcagaggcgtcatcgccatgactttcagatgcagtcatgtgtcagcaacaaggacacattcacagaagggtgtcattagtacatttcaccatgtgagcagtgtagcatacgcgcacacggacttcactgctgaagctcgccacactcctaggctatggcgcgtggccattctcctggctgcggccctaccctgcaggtgactgtaaagctgtaagcagctgcgactccatggtgattatctgtgtgtctgaacacatcgaaacaccgaaaagggctgggagctgtggctcacgcctgtgatcccagcgctttgggaggccaaggcgagtagatcacttgaggtcaggagttcaagaccagtctaggcaacatggtgaaaccccgtctctacctaaaaaatacaaaaattagccgggcgtggtggtgcacgcttgcaatcccagctgcacgggaggctgaggcaggagaaccgcttgaacctgagaggcggaggtcgcagtgagccgaggccgcgccattgcactccggcctgggcaacagagcgagactccgtctcagaaaagacaaaaaacaaaacaaaaaaaactctagaaaagatgcagtaggaaggcggtattgccatctcacaggccgccgggggtgcgtggtccgtccctgcgtggatgctgtcacgggcctgcagttgcagagggattgctcacctgccctttctgggaagatgagacgatgaccagccgagcaccacaggccttggagagcaaggcacgggctccctcctggggcacactccctgagccgtggggcggaggccgtctccagctgagctgccggcactgggtcactgcatctgacgaggcccccagtcctcatgccgcttccctgtgttcctttccttagcacgtctgccatgtctctcctctatgaatgtgtgaacaccgtgattgcaggtgagaactggcactctccccatctggaagggctggcactgccaggctggggtctcaggtggggacaggagggcgccaggcctggtgtctccgagcgccacccctgctggaactgagaaggaaagctggctggtggggcctggggctggctgggagtccgtcccaggcctctgctgtcaaggtggccatgcgtctgcctggtcttccaccgccattggtgctgggtgtttgcttcttaagctgcctggtggcccagccactctggagtccccttgggtatgaaagattcacctgcagataaagcccctcctcatacctgcttccacagatgccggcccctgctgctcagggcctgccatccgctctcacagtacactgcattttttctgagactttaaagcactcctgagacagcatatcgtttcacccgtggatacttaaatagcagcatctaccacaaaaatattttctttttctttctttttttttttttttttttgaggcagagtctcactctgttgcccaggctggagggcagtggcgcaacttggcttactgcaacctccgcctcccaggttcacgccattctcctacctcagcctcccgagtagcagggactataggcgcccgccaccacgcctggctaatttttgtatttttagtagacacggggtttcactacattgatcaggctggtctcgaactcctgacctcttgatccgcctgcctcggcctcccaaagtgctgggattacaggcctgagccactgcgcctggcccacaaaaatattttctaaggcagagtcagaatccacacctccggctgggccagggcacaagggccaacgaccaatgtccccagtggtctctgccaagctgctccaagtcagccaaagcctcacggggcattgggcggtggacttccttatggttgataaagcagaagcttctcaccagtaggagggcccagctattcaggaggccgaggcaagagcatcacttgagcccgggagttccaggctgcagacagagtgagaccccgtctctcttgaggctggtgtgcagtggtgcgatcatagctcactgcagccttgacctcccgggcttaagcagtcctcttgcttctacaggcgcatgccaccccacccaggtaattttttgaatttttggtagagacaaggtctcactatgttgcccaggctgttcttgaactcctgggctcaagccatcctcctgccttgacctctcaaagtgatgggattacaggcctgagttactgtactcagccagcaccccatctcttttgtttttttttttctagctttacttaggtatagttgacaattaaaaatggtatatttttaaggtacacctctagattgtcaaatagcacaattcagataattaacacatctacacaccgcgcccggcctacatttctgtttaaaatacatttgttcctacctgggtaatctatacacctattttaagaaaaaaaaattaccatctacttttatattcacataacactcctggccgggcgtggtggctcacgcctgtaatcccagcactttgggaggccgaggcaggtggatcacctgaggttaggagttcaagaccagcctagccaataatggtgaaaccccatctctacctaaaaaatacaaaaattagcagggcttggtgtcgggcgcctgtaatcccgactacttgggaggctgaagcaggagaattgcttgaaccagggaggcagaggttgcagtgagccaagattgtgccgttgcactccagcctgggcaacaagagcgaaacttcttctcaaaaaacgaaacaaaacaaaacaaaaaaacaacactcctacaaagattgggtgtgacatttctgaaatcttgcatgcgtgaatatgcatttattttgccacatttcttcgttcgtatttacatttatatgtagactttctgtccagggttattcatttccagatatttgtattttttgtattaaaaaaattattatttcagtagtttttgggcggcatttggtggtatttggttacagggatcagttctttagcggtgatttctgagatttatgtgcaccaacacccaggcagtgtacactgcaccccatgtgcagtctcttatccctcaccccccacctcccacaagtccctggagtccattagatcattcttttttggggcggtgggggggatcgcggagtttctctcttgttgcccaggctggagttcaatggcacaatcttggctcaccgcaacctctgcctcccaggtcaagcgattctcctgcctcagcctccagagtagctggggttacagacatgctccaccactcccgcttatttttgtatttttagtagagacagagtttctccatgttggtcaggctggtcttgaactcctgacctcaggtcatctgcccgcctcagcctcccaaagcgctgggattacaggcatgagccaccgcgcctggcctagatcattgttatgcttttgcgtcctcatagcttagcttccaagaacccatgtcttaaaaagaaaacacatgcacacgcacacgcacacacggtctcctgtacaccttcattccatgccactggcttggtggaaaatgagtctctgtccctgcatgtgcctggcggtcccctggcttcatgtctttcttttaaagctgttagagctggggctctgagggtcggcttctcgctgcctgcctgtccctgcccaaaggacgcagcagagtcagcaaaggggaatggctccggggatgttggggaggccaggcccagcttctagagccttctttcagtggagtcctgccggatgtgcttcatcccccagcagtgagctgtgatgataatttgtgaagtgtcaccatggaggctcccagagacccagcgcctgggttcctacagggtctggtcctgtggcctcggggcctggcccctgccgggattccagactccagagggaagcaggggttgcgagtgaaccagtgtttgcaggaacagctgaggccccgagccatcctgtcagtgagggtgggggcccctgcaggttcctatcctcaggcctgtgatggagctaggtttttgcaaacacagttgggctgcgtggtcccaaactcagtggcatttctgtcctccctcccatccctcctcccggcgagggggtgctggtgccccgtggccctgagttggtgtcggcgctggccatggtgctgaccgtggtgctgaccaagctgtctgttgcagtgctcatctcgctgtcctccggcatgcccaaccacagcgccagcatccaggtacgtcccgcactgggcggggcccatggggtcccacactgcagaggccacacctttccacaggcgggagcttgcccaccctgtgaccaaggtgctggtccccccacgccatcttgcggcttgggagggcacagccgcgtcctgtgtgcactacctacccgagcctgcttgggatccccatcatgtgtctgtggggtggatgcatggggcactgaggagtgggggagagcgcccgtgggaagcagggcctcccttgtctccagtgccccatgtgggccatgcttgtttccctcctgggctttgattggtgggtggggctgacgccgggccttaggccaggttgaggttgaatctggagggtacctgtgggactcacccttggtttagaggatgtaaccagcatcgtttttttcttcttttcagctttgtgttcagaaattaaggatattgatcgaggactccgatcagaactgtgagtcatcccctccccagtgctgtcattttcgtgtccccagctctgtgaagttaggggtcctcctagtgtgaggaggaagtggacacggcatctgcaaccccagctgtctccctgatggatggcactctgcctcagaggcagccctctgccagtgccctgtggcgcccttgcaccccgacctatctgcgtggggtggctgggaaacaccagctcctctgagccccagtcccaggggagatgcagggggcatggcaaaggcccccactggggagatcctggcagttggacagatgccactcactgagcaccttggtccgaaatttctggatatttcagcctctgcatgtttttgcgggggtgcgtgaggctttgcgttgtgagatagagcagcacacagcacccttgcccaggtgcctgcctgcatgtgggtgcccccgtgctgctctgttgaggaatcagaattagcggcccctgcctggtaccttgtacctgggcggtgttttggatgctcattttgaagccaggtctttttgttgagagcaggagttggcaaactcgcctgcaacagcccagatagtggagtggccctccttatctgaggtttcaggtacccccaacacagtccaaaaataggcaagcaccccacagtcgggtattgcaagagagaccgcgatcacatacctttcgtgaccgtgttttatggttgttctgttcttagttactattagttgttcatttcttattgtgcctaatgtacacactgaacttcgccataggcacagacgtgtcagaaaaacacccacacgcgggtctcagtaccgcccgccgtgtcagccttccactggggtcatgggcccatcccccacgggtaggtggggactactgcgttttctccgtggacctcacggtgtctgtctctgctcagtgctgccccgtggcctgaaagccaccgtggatggcagtatgtgaatgggttcagctgtgtgccctgtggctggggtggccctggcttaggttgtggcatctgtgcctcatgcccagccacccttagctgtccgtgagctggtttgggctagtcgggtgaacagtgagtactgggtacaggtgagaccctgccttgggccaagggtatctgctgctgctgctggaaagtcttctctgcgttcttccctgcactggctgggtgggaagaggagagctgacagcagctactacaacgtggtagtaggtaggggaggccttcctgagggagccggcatgggggcagcctgcaccccggctcccagggagggggctctgctagggcgacatccctcgtggtgagctccagctgggatacttgctctgtccacccccaggttgccaaggccaggcagcctcccgaggtggagacccggcccggagagccgtgggccctgcctgcaccctgctgcctgtgtccgtcccagtgacccggctctggcctctctctgcagtgaagtacctggggctgctggcaatgtccaagatcctgaagacccaccccaagtccgtgcagtcccacaaggacctcatcctgcagtgcctggacgacaaggacgagtccatccggctgcgggccctggacctgctctatgggatggtgcgtgccctctgtccgccgcccgcccgcctggccttagttctctaagggacattaagtgtcaggtgcagagccacgtggaatgcatggagtcccctcacactcggccatcagttagtgtggtggggcagggcagaggggcgccagtcctggtccatgcctgtcttccagggcctgtgtggagggggcggggccgagcctgcagaacagactgtgctgggccagttgttgctccctggctggggtcgtgtgcctctaacccagcccacatcgcaggggcctgctgcctccctggcatcgatctgtgaatccgggtccgcctgtgtcccgtggattctgtctcaggagcaggtgttgggtgtctcaccaagcaggccccaggctgggtccgctctcaccactgtctgtacacttttgcccaggtgtccaagaagaacctgatggagatcgtgaagaagctgatgacccacgtagacaaggcagagggtaccacctaccgtgacgagctgctcaccaagatcattgacatctgcagccagtccaactaccagtacatcaccaacttcgagtggtgcgtcccgctcccaggggtgtggccgggggttccgtggcgccgctcactcaccgcctctgccccacaggtacatcagcatcctggtggagctgacccggctggagggcacacggcacggccacctcatcgccgcccaaatgctggacgtggccatccgcgtgaaggccatccgcaagttcgccgtgtcccagatgtctgcgctgcttgacagtgcacacctgctggccagcagcacccagcggaacgggatctgtgaggtgctgtacgctgccgcctggatctgcggggagttctcagagtgagtgggcgctgggcctctgggctggcagcttctccaagcttctgaggggtagggaccagggatgtgcctggcagatccttcctaccgtctcccatcgccctgccaccccggccgtcttgcaggtccgtgggtttccagcacctgtcccctgacaatggtcgggcccattccccctttacagaggcgagtctgtgctgccctgtctgccctctgccctcgggcatctgtggcgttcccaggagattgtagatcccgtgggcactaggactgggaggtgggaggatccatggggtgggctgcagacggggggctggccctgggcatctgcaaggctcagttccagctgggcgcgtggcagcccttctgagccctgtttgctgtaggtgaggtgggagctccgtgtggcagttaggtggcccagggaggcacctgctcagccccagcctgcctgcgccaggcccctctggaggcacaggggtctcagtgccaggttccaggtgggccgcagggatgggtcttatcgacactgcccctgccgtctccaggaatgtcaggttctccctggccaagaggacagatcacagccactgctgggcaggctcgggtcaccgggcctgcctggaggtgggaatgtgttgctgagactcacggttctcacagcagtctggatttccaggctctcttggaaatttatgagatttgccgctatgcctcactgcctcgggcccggccccatcaccaccactggccgctacctgctgctcatcacggccacaccgagcactccccaccctgggcctgccccggctcaggaaggcgcctgacttctgggatcccgaaagggtccccagccagcctgcatcctggagatgagcacttctgtcattttctttttttcccctcgccccgagacagagtctggctatctcccaagctttgcccaggctggagtgcagtggcgtgatctcggctcactgcaacttctgcctctcgggttcaagtgattgtcctgcttcagcttcccgagtagctgggattacaggcacctgccaccaagctcaagcctggctaatttttttgtattcttattagagatggggtttcaccatgttggccaggctggtctcttaactctttttttttttttttttttttttttgagacagagtcttgctctatctgttttccaggctggagtgcagtggcatgatctcggctcactgcaagctctgcctcctgggttcacgccattctcctgcctcagcctcgcaagtagctgggactacaggcgcccgccaccatgccctgctaattttttttgcattttttagtagagatggggtttcaccgtgttagccaggatggtctcgatctgttgacctcatgatccgcccgcctcggcgtcccaaagtgctgggattacaggcgttagccaccgtgcccgccctcactttctgtatttttagtagagatggggtttcaccgtgttggccaggctggtctcaaactcctgacctcgtgatctgcctgcctcggcctcccagagtgctgggattataggcgtgagccaccacacccggccacttctatcattttcttattgggaaaaaagtggactagaaacatattcaagtcccaaggcattgtgtcagacgccagtgaggcgcaccccgaggccccactgtcccacagatcagggtctcccggttccgtctgttccctgcccatcctgcttatcctcccagggccagctgcacagttgaccccgttgtcctttttcctcttctgacctttcctccattcagtggctctgtcatctccacatctctgccttgtttgtgttatgggctgttgacggcctgtggtttcttctacttcgtgtctcagcccctggagaccgctcagggaatgggaagggcccagagtcaccttgttggtgacgagcccaggcctcctaggtcctcacctgctagagaggagccccgggattggcatcctgggggctcacagtgtttcctgtcctcaggcatctgcaggaaccacaccacactttggaggccatgctgcggcccagagtcaccacgctgccaggccacatccaggccgtgtatgtgcagaacgtggtcaagctctacgcctccatcctgcagcagaaggagcaggccggggaggcagagggcgctcaggccgtcacccagctcatggtggaccggctgccccagtttgtgcagagcgcagacctggaggtgcaggagcgggtaagatccaacactccgtgttgggccgagcctcagggagccctcagtgcctttctgtccagtggcggccaggtcgacggggcctcgcttcctcttccgaagccactcactgagattcttttgttgccacttgtgccagctggggtttggggttagtcagtgggacctggaggtcagcaggacgggggatccgtcagtaggactggggcaggtctctggggtgctgggtatgtgagggtgctgctcctggccacaggaagaggttgtttcacatgcggcgagacagcaggtgtgagagcctggggctggcagtggctctttctggtggctgcaggtgacgtgggttctaggttgagcagactgtacacctgtgccaggcggtgcccaccacttcccaggtgtctgtttttctgcttgttttttgttttgttttgatttttcgagatggagtttcactcctttgcccaggctggagtcaagtggtgcgatctcagctcatgacaacctccatcccctgggttcaagggattcttctgcctcagcctccctagtagctgggattataggtacccgccaccacgcccggctaatttttgtatttttagtaaagacggagtttcaccttgttggccaggctggtctcaaactcctgacgtcaggtgatccacactccacagcctcccaaagtgcaaggattacgggtgtgaaccatcgcacctggccatctgtgagagaggtcgggagtggcgtcagcctgtccaatggctgaggagacccagcttcaaggctgcatggggcgtggccccgggctcctctgtgcggtggcattagctcggggctggccatgatccttggcccatggtcactgttggagctgcccagcctggctgtgtctgagttggagccagcacagaggcggggagcccgcgggggccgagggaggtggtgcttctggtgtcggggcactgacctgatgggaggcatttctgcagtgggcaaagctccctgttgtgcccccatctctgttctgtttccggactggtctgtttctgccgcttcctggcgaggatgatgacgacagagacggcatgaaggctgggctctctgtggctatgtggctgtaccagggggcccacacgtcactgtgccaggggctgagccaccccgtgtccctgaaggtggccgagtggccttccgggcaggtgccagcagtgacccctgtgtcccccacaggcgtcctgcatcctgcagctggtcaagcacatccagaagcttcaggccaaggacgtgcctgtggcagaggaggtcagcgctctctttgctggggagctgaacccagtggcccccaaggcccagaagaaggttccagtccccgaagggtaaggatacgggggtgggggcattgcaaccatggccctgacatggtcccttgatgcctggtggcacagcgggggctcctgcacccctgaacagccaggagggtgtggggctgattggaggcctcaggcgggtatatccctcacacggactcaccaggtctctcactggttctgggatctggcttctgcctggggatgctccctgcgaagtgggcctgctcccacccttgccataaagctctgaggcagcctgagcctgccgtgggggccccactgtgaccctgccgcagtcttcctgggtccctgcgtcctcttaaggggcagtgacacctgcctcgctggccctgtgtgggtggcaggccccactgtttgggatatcacatggccaggcacgtggtgagcctgctcagggcggacgcctgcaggcgcgtgctcggtcacacactgccttgtgtggccctcctgtccggtgcagcctggacctggacgcctggatcaatgagccactctcggacagcgagtcagaggacgagaggcccagggccgtcttccacgaggaggagcagcggcgtcccaagcaccggccgtcggaggcggacgaggaagagctggctcgggtgagctgctggctgcccctggcgagccctcgtctcctccctcctgtcccagggagtctttgaggcaggtcagcggcctctgtgggtcctggccctgaccctggcagtggaggcatgggcgtccctgcctcccagagcgttagcgattccttttcccccaatacgtgctcttcccaattgcgggccttggtttccctgttagtgaaagctcagtagtgaaaatagccagagatccagccttccccagctgggtggctggtggtggacgtccacagaggggtatcctgcccgcttctctcgggctcatgccaagctgtgtcccacagcgccgagaggcccggaagcaggagcaggccaacaaccccttctacatcaagagctcgccatcgccacagaaggtgaggcccgtccccgggtgcctgtccctcagcaccctctaccctcaccacccgagccccgcggcatccatctgagtttcgggttccctcaggaagatcctgggaatggagctggggccacacggtgactgtgcggagcctttgaggggcaggcgcctccctgtgggccccattcattcgagcctccagccggggggccctgttccctgcgcctggcagcccagctgctgtccagccctgaccccacggtcgtgggcaacctgctgcctcactctgggcttgaggccgcattacttttctcatttgaggagaaaacagaatattcacgtaaaaaaagtgaacgaggatttgcttctctctgctcataggcctgtggggtcactcgtgtgacaagctttccagtcctcactgtcttgaagagtcgggtcctcgggatgcgctcgctcacggcgctcctcgcggcccagggctctggcaggaccccagctccttaggatgttggggctgcgtcacgctccctgcatccccgaggcttgtcttgcacgtgtgtcacccctcggtgcaccggtaacgcctgggtgttgcctttgcagcggtaccaggacaccccgggcgtggagcacattcccgtggtgcagattgacctctccgtccccttgaaggttccaggcaagtgtctccggtgtgtcggcgccgcatttgtcacatgggctgtggggtgctcccgccgccctccccgtgagcccctggggtgcagtgctgagtggctgcccgctgccggcccgcagggctgcctatgtcagatcagtatgtgaagctggaggaggagcggcggcaccggcagaagctggagaaggacaagaggaggaaaaagaggaaggagaaggagaagaagggcaagcgccgccacagctcgctgcccacggagagcgacgaggacatcgcccctgcccagcaggtggacatcgtcacagaggagatgcctgaggtcagcctcgctggaggtcccggtcctaggatgtctatctttccgcatgtgtgtgtcctggggccatgcacagtggcctctccccatggtcttcgttggtggctgggatgaggccccaccccggagagcataggaggagaggcctctctgtcctcgagcacgcgtcccgacgcaccgccccagggccagcagcttcagaggcagatgcaggttggctgcgtcctggggcccagccgcccttagtgcctagacgctgagcggagcctctggtggagccacgtcactgcccacctgtgcgtgtggcccgcatgggcagtcccactgcgtcccagatagatggcgttccaccaggccacaagggcgggttccagtgatggggttcctctcttcctgtcagaatgctctgcccagcgacgaggatgacaaagaccccaacgacccctacagggctctggatattgacctggataagtgagtccatatgggttcagggtgagggtggaggccacatgtggttgcttcccttcctctcgtcctcccttccgggtggggccgggctctgcagggtgggcaggctggggtggggtgcgggcgggccttccccagaccacgtcctcactgcactgctcttggctggccctcccaaccaagactcttaagtgtggactctgaagtctccaggcctggggtgctcgggaggtctccatgccttgacagggcagggtgtggccaccacagaccctcccatgagagcctccagcaggctgtgttgagtagatctatgttgggccatggctggggccaggggctggaggagcaggtcccgcactgccacatgcttggacacggcatgtactgagtggtcctggggggtggccagtggtgctgatgtgtggcccggtcattcctcctccaggcccttagccgacagcgagaaactgcctattcagaaacacagaaacaccgagacctcaaaatcccctgagaaggacgttcccatggtagaaaagaagagcaagaaacccaagaagaaagagaaaaaacacaaagagaaagagagagacaaggagaagaagaaggagaaggagaagaaggtaaggctagtgcccagggcggcggccttctccattcccctcccttgccgtgaactcccaggagacagcggtgagctcaggggaaatggctgtgagtctgagtcaggcagcgagtgccagccgcctcgccctgtgccccggcggagtgaggacatgtggcttctgaggggagctgactgtgcacttgtgtcaggggagactgaggaggacccaacgatcccatgggtgagccgtgtcctcacctgtgttggggggacatggtcagagctcggcgtggtccagatgccaccctcacgtgcagctccagaaccgtttctgcagtgtctgtgtgcagattttcacatagagaaagaaatgggtttttcaaaggagcatgtgtttgcagggcctgggagcctgtccacacccacgtcaggtggcccaggcagacataagacatatgggccgccacgggccttctgaccactggaatggcacacacccacccacagctttgtccccggccctcttctggcagcgaaagccagagccagcagggctggctgaggacatcgccttcagctcctggattcccaggctctgcaaggcccagctagtccaggaccctgggggcagcgagggcagctggggcctccttggccctgctgtccccgtcccctcttcccaggaccattgcactgcgtttgctgacagcctgtcttgtggtttcaggctgaggacctggacttctggctgtctaccaccccaccgcctgcccccgcccccgcccccgcccccgttccatccacggtaagagactggcagctggccagtgccagcctcggtgtctgcagaggtcatacctggcactcagggaagagccctgggtctcctgaggccctgtgctctcgcggtcagcaccgtgcacctgtgggacccagcactgagtggagccggggtcatgctcccgggtcccagtgggccaagcaggggccaggggaaggggaggacagccagggcctctgtgctcacaggctccctgtcactcggagggcactgtggcctctcaggcaggcgtgagggcaagctgagggtgtgtggcatggaggctgtctggggtgcagtggagtggggcccctcattgcccagcatgagccccaagccctggctccctgcagggggagctcagtgtgaacactgtcactaccccgaaggacgagtgtgaggacgccaagacggaggcgcagggcgaggaggacgatgccgaggggcaagaccaggacaaggtgaggctgtcactcccccaggggctgtggagggctgcatgagccccagcaccccaacgtggggccggacacagcttccgccacccaggtcccagggcagccctgctctcgcatttgtgttggcgttctcacgggccttttgttgtggttgtggtcttgtgtttttttaataaccttcttattcacacatggttcataagtctcatagagtttattcatttgaagtatgtatacagtggttttctgtatattcacagagttgtgcaaccatcatcacctctgtctagttccagaactttccatgacccctaaagaagctccattcccaccagccgttacttctcactcccttccctgccctggcacccacgcatccccttcctgtctctgtggatcagtgtgtcctggacatttcatagaaatggggtcatacaccgtgtggtcttttgtgtgtggcgtctcactgagtgtgatgtcctcaaggtgcatccacactatggcttgggtcagagcctggttcctgttcgtggccgggtcatgttccagtgcgtggacaggtcaccctctgctgaccccgttcctccgcggatgggccacactgtgctgacccactcatctgttgatagccacttgggccgcttcccctttgtggtgacacagtatgccgctttgaacatctgcgcagtgcgcgtggatgtgtgtgttccctctcggatgtgcacatgggcgtggggttgctgcgtcaagtgtggtgtcctcactggtttgccctgcatggctccctggtcggtggggactgttccccgggctgctttggcgcttgccgccaaccagagacggccccagcctccgctgggcctggtctggcctgagcttgtcccggtaggcctgaggcgtggctggtcctgccatcccacccaggcacgtgggaccctcagcctgagcagccctgctgtgatcctgacctcacactgtgatgggggcgtgctggagcagcctgggcactgaacccgaccctcctcttgctccagaaatctcccaagcctaagaagaagaagcacaggaaggagaaggaggagcggaccaaaggcaagaagaagtccaagaagcagcctccaggcagcgaggaggcagcgggggagccggtgcagaatggcgcgccagaggaggagcagctcccggtgaggggtacttcagcgcccccgccccacgccggggttcctggcgggctgtgcgctgctccccactcctgcagcctccatgcgggagagaactgagcagattcgagaagaagccgagcctggcgggggcaggggactggccctggcccgcagccccacattaggcacccccgtggtgggctgtgtggtcctgggagccggggatccctcatcggctcctttgaagccccttgccccaagcattcttggagtcgtggcattcgacctggggtattgggccatactggagtcttcgctgagacggagctcggggcccccaaggctgatgcgccttttctatttccagcctgagtccagctactccctcctcgctgaaaattcctatgttaaaatggtgagtggcagccgctcccaggggcagggtgggccagcccacactctttggcatgggatcgcgcggaacccgggcagcccccacagctcccggatgttggtatacccagggcctgtgattcctggcaggggcgttgcttgggcagcacctctggcttggggtaaggttggagacatgccctgagacttggactggcaggagggtccccgccatgcactcaaagagcagccataggaggcgcttggcctgcggctagggggcgcccctctccgtgccttcctgtgcctgtgggacccctgctgcctctgtggtcattaagagacaggtggctgtgcctgttccctgtggcgggcccgcctgccctgctaacactggccatgccctgcagacctgtgacatccggggcagtctgcaggaggacagccaggtcactgtggccatcgtgctggagaacaggagcagcagcatcctcaagggcatggagctcagcgtgctggactcactcaatgccaggatggcccggccgcagggctcctccgtccacgatggcgtccccgtgcctttccagctgcccccaggtgagccctgccccactcacggcctctcctggggactgtgggagcgcagtggcagctggtgactgcccggatccgctggttcttgttgcttcctccccatgtcccctttgtccccaggctgcacctcagtacctcctgagtgtcggggtctcgccacagctctctgagaagcgcaatggcctcggatggacctggctagagtcccaagggttgtgctgggggctggattctggggccttcttgggttccacggttccagtggccaagtctgccctctgaaacagggatgggaccaagtccaggccaaattagggacaccagtagcctcttgtttctgctcctgtcccctggtgctcccttgggggctgagctcagtttcctaatcagccacagaggacttgggactgaggacagacctggaggccccacccatgctgagcccccgcagcgtctcaggccccactccctctcgcccccgccaggcgtctccaacgaagcccagtatgtgttcaccatccagagcatcgtcatggcgcagaagctcaaggggaccctgtccttcattgccaaggtatgcagggctccacttggcgttgaagagccgactctgcaggcaggggctcctcctgccccatcgcagtgggtgtccaggtgtccctaggggaagtgggccacctgcctggggaaccctgagccctgagctgggcccgactcccctctcaactgcaccaccttcactccaccgcagaatgacgagggtgcgacccacgagaagctggacttcaggctgcacttcagctgcagctcctacttgatcaccactccctgctacaggtggggcccaggcccactcccctatgtccccgaaccccctccgcctcccctctaccttgcagacacctgtgccccggggactgaggcttctgggcaggactttagagacggatttggaggcgctggctcgtgactggtgcaggtcaggctgcctggtgtctgcgccagccggggccgtgtagttgaagccacaggccaggcagcgtcacccatagaggtccaggcccctggaagtcctgaaggctggaggggtgagaccaaggagccagcagggcaggctcctcctgaagcctctcctcggcacggcttggcgtgcggcaccccctcccccctgagtcctcacaggccgtcctctgcgtgcctgcatcctagcctatccccccagtcccttcctacaggacatccgtccttgtcggaggagggcccatcccatggcttcaggcacctctgtgacctctttaaagacaagtcattgtcagtttctgggtgtgacggcttccgcacatgaaaatgagccacaccttccaggacccccaagacctcccggcccagacacacaggagggtgtccaagcgcagcgtgtgtggcaggttttgttggcctctgtgccaggaagcctgaggagcccggccccaccgcagtcagcctccctgtccctcccacagtgacgcctttgctaagttgctggagtctggggacttgagcatgagctcaatcaaagtcgatggcattcggatgtccttccagaatcttctggcgaagatctgttttcaccaccatttttccggtaaggagagtgaggggctgatggattgcacggggctttcacgcacgcggcagctgtcccttcctattggagccgggcctgtggccctcccacccaaactcacaccctttgggatcccgggtggctggtggccccgaggcctgggagctggtgcgggggctgcattccccacaccccaggcctctcagggccacaccctgctcctacaggcctcctgaagctgtggccaagggcagcccaagaaggtggcccctgctctgggggtggggctgcagccatgcaatgtccgggaagcctaacactgcccgctctgttgcagttgtggagcgagtggactcctgcgcctccatgtacagccgctccatccagggccaccatgtctgcctcctggtgaaaaaggtgagcctcgggctgctgtgcacaccctggctcctgccacctctcctggggtcatgcccaggccttcatccccagaggcgcgctttgggacttagagggctcgaggacagtgatggcagcactgctgccatgagcccctcacctgtgccagccccactcagcagcacagactctccctcagcaagacagggcttctgcctcctgctgcgctgctcaccgcaggctgacacatggctccaggggccccactcccactgcactcctgcccaccaccccacccctgtgcacaaggcagccaaggccctggggtcggactctccacctctcactgctgcgcttctagaatgactcctcgctccctccgctccgggcctccctctcctgagtactgcagggtggttgtcttcgcagtgtgtcgactgccaaacgcagtgtgtgaatattttgttgagggcttttgtgtctgtatatgaggagttgggtctttagttttcttttctggtggcttctttggttttgtcatccagtggcttcatcagacgtgcagtagagtgtgtcctctctgttttggggcagactgtgtgataagtggcatttcttccttagaaagaaatgtgtatacagaattcaccagaaaaccatcgggcctggggagttccttttctgcaggcttttagctacatcctcagttttttgttttaacagttgtaggaatccccaagttaccgttcacgttgggtgagtttggtagttttgtacttttcaaagaattagcgcaaggaatcatcagtcactgagttgacgcgtggcggtgcgtgccgtattcgcgctgctccttgtgatgataccgggtcactttccgttctgatggtcacggtttgtgtctcttttttcctggttctcctgggtagaaccattttattgcacttttctttttttttttttttgagacggagtctcgctctgtcgcccaggctggagtgcagtggtgcagtctcagctcactgcaagctccgcctccctggttcacgccattctcctgcctcagcctcccaagtagctgggactacaagcacctgccaccacgcccggctaattttttgtatttttagtagagacagggtttcaccgtgttagccaggatggtctcaatctcctgacctcatgatctgcccgcctcggcctcccaaagtgctaggattacaggcttgagccaccgcgcccggcctttattgcacttttcaaacaaccaatttttcttgatgtccggtttggttccagtgccctctgggagcatactgaggatttccagtttgcacgtgtttctttcgcttctctgccttcttctggctcatgttcactactcagcattccgttcctagaggtctgttgtggttttgatacccttgctttgtttttttttttttgagatggagtctcactctgtcgcccaggctggactgcagtggcgcggtctcggctcactgcaagctccgcctcccgggctcatgccattctgcctcagcctccgcagtagctgggaatacaagcgcccgccaccacatccggctaattttttgtatttttagtagagacagggtttcaccatgttagccaggatggtctcaatcttctgacctcatgatctgtctgcctcggcctcccaaagtgctgggattacaggtgtgagccactgcgtccggcctgtcattgctgttcttttcattcctaatgttcagttttctcctgattcactgcctcccatgaaacactcactccccgttgcctccccagcccctggcaccatgtattctactttgtgtctttgtgaatctgatggctctagggacctcctaggagtggaaccacacggaatgtatccttctgtgtctggctgctgttattacacctcatgtccttaaggtgcatccacatcgcagcctctgtcaggattcccttccttttcacagcagaatcatattttgttgtacagatggaccatgctgtgtgtccactcatccatcgctgctcccaccttctggctgttgtgaattgtgctgctatcaacattgttgttaaacaaataactgttggagtccctgccttcagtacttttgtttttttttatttttttgttttggaaacagagtcttgttctgttacccaggctagagtacagtggagccaagggctcaccacaacctccgcctcccaggttcaagcagttcttctgcctcagcctcctgagtagctgggattacaggcacatgccacctcgccccactaatttttgtatttttagtagagatggggttttgccaggttggccagactgatgtggaactcctgaccccgggtgatctgcctgcctcggcctcccaaagtgctgggattgcaggagtgagcccatttgttctgaatatacacccgggagtgtgattgctgggtcctgtggtaatgccacgtttgaggttttgaggagctgccagactgtcttccccagtgctgcactttgtttcccgcctgctgccgtgcaggaggccctgtttcttcacctgtcgtcatcgtgctgacagcagccattctttttttttgagatggagtctcgctctgtcgcccaggctggagtgcagtggtgcgatctcagctcactgcagctcctcccgggttcaagcgattctcctgcctcagcctcctgagtagttgggattacaggtgcccacgaccacgcctggataatctttttgtctctttagtagagacggggtttccagggtttcaccatgttggtcaggctagtctcaaactcctgatccgcctgcctcagactcccaaagtgctggtattagaagcacgagcccccgcgcccggctgacggcagccattctgctgggcctgaggcggctggagctgatctgttgctgctttttgggtgctgcacacttcctccctgccgagaccagcttggtcagggagaccctaacccagtggcgctagaggaattaaagacactcacacagaaatacagaggtgtgaagtgggaaatcagggatctcacagtcttcagagctgagagccccgaacagagatttacccacatttattaacagcaagccagtcattagcattgtttctatagatattaaattaactaaaagtatcccctacgggaaacgaatggatgggccgaattaaaggaataggttgggctagttaactgcagcaggaacacgccctgaagacacagctcgctcatgctattgtttgtggcttaagaatgcctttaagtggttttccaccctgggccagccaggtgttccttgccctcattcccatcaacccacaaccttccagcgtgggcgttagggccattatgaacatgtcacagtgctgcagagattttgtttatggccagttttggggtcagtttatggccagattttggggggcctgctcccaacacctccccagcctgggctgctgcccctcacgccccagaggccgtattcagatgggttcatggctgttgctctcttgccaagctcaccagtctgcctcgtcctagctgttctgccattgagcccacacagggagggtcttatttttcaggtctgaaattcccactgggcccttcttgtatcttccatgtctttgctgatgccctggtgatctgttggagcattttcctaacagctactttaaagcttaggccagctgggcatggtggtgtgtgactgtggtcccagctacttgggaggctgaggcaggaggatcgcttgagccctggaggtcaagatcagcctgggaacatggcaagaccccaggtctacaaaaaattaaaaaaattagccagtactaagaaattagtacagtgagcctgtagtccctgctacttgggaggctggggtgggaggatctcttgagcccaggagtttaaggctacggtgagccctgattgtgccactgtactctagcctgggcaacagagtgagactccaaaaaaaaaaaaaaaaaaaaaaacttgtgtcagagagtcctagtgtccgtccaccttggtacgctgatggccttggtgttggggtctgcacgttggggtcttcgtgttggtttctgccaatggccttggcattggtgtcttggcgttggggtctgggtgttggtgtcttggcattggggtctgggcattggtgtcttggtgttggggtctgggcattggtgtcttggcgttggggtctgggtgttggcatcttggagttggtgcctcggcattggggtctgggtgttggcgtcttggagttggtgccttggcgttggggtctgggtgttggcgtctcagtgttgcggtctcggcattggggtctgggtgttggggtctgcgtgttggtgtcttggcgttggggtctgggtgttggcgtcttggagttggtgcctcggtgttggggtctgggtttcggcatctcggtgttggagtctcagtgttggtgtctcggtgttgcggtctcagcgttggtgtctcggtgttggagtctgagtgttggtgtcttggcgttggggtctgagtgttggcgtcttggagttggtgcctcggcgttggggtctgggtgttggtgtcttggtgttggtgtctgctcacggccttggtgttggggtcttgagcgtggggtcttggcattggtgcttcagcattagggtctgggtgttagtgtcttggtgtttggtctgctgatggccttggcattggtgccttggtgttggcatctgggtgatgtgatcttggcattggggtctaccgacggccttgccattagtgccttagcactggtgtcttggtgttggtgccttggcactggggtcttggcactggggtctgccgagggcctctctgtatgagtggattctcctggtcgttttccgtggagtgctgtgagcctctgggccttgttccatcctgtggaggacgtgggtggtcaggtcccagctgcaagtcccccctgccttctggggactgtggccccaagcacaccaccacctgcccagcctctcctgtcagtgctgcctcttgtccctggccttgggacccggcagcggcctctggactcagtgccttcggttgctctttggaacgggatccgcagcatggagtgagcctagcagatcgtgagcagcttcacggggtggctttccccgcgtacctccctctctgggggctctggttaccccactccactggcttcttccacagtcacttcaggggcccagtggcaggagggcggaaggacagacagtgctcaactgtctgctagctcaggagctcttcggattctggtcttcatccccggctgcctctggctgcctcagggccctcaggtgccggctcccacttctatgtaggctggagcccctcccacgggagacccaggtgccttgggccgctccctcacccgagcccttcccatttttttttttaataattagcaaattcgcaaaattaaaaggacaacacatacagctgcgaggcaatatttgcacatagtgtttttttgtttgttttttaatttttttgaggtaggaactcactcttatcgcccaggctggtgtgcagtggtgcaaacacggctcactgcaacttcaccctcctgggctcaagcgaccctcccgcctcagcctcccgcatagctgggaccacaggcatgagccatccggcctggcctgcatgtacttttatttatttatttttgagatggagttttgctcttgttgcccaggctggagtgtggtggaatgatctcaactcacatgcaacctccaccccctgggttcaagagagtctcctgcttcagcctcccaagtagctgggattacaggtgtcctgccacgatgcccggcacattttttatttttattttatttatttatttatttatttatttatttatttatttatttatttattttttgagacagtctcgctgtgtcgcccaggctggagtgcagtggcgcgatctcggctcactgcaaggtccacctcccgggttcacgccattctcctgcctcagcctcccatgtagctgggactacaggcacccgccaccctgcctggctaattttttatatttttagtagagacggggtttcaccctgttagccaggatggtctcaatatcctgacctggtgatctgcctgcctcagcctcctaaagtgctgggattacaggcgtgagccaccgcacccggccattttttgtatttttagtagagacagggtttcaccgtgttgaccaggctggttttgaactcctgacctcaggtgatccacccaccttggcctcccaaaatgctgggatcacagacttgagccaccgtgcctagcccctgcacacacttttaaaatatccatcttttttccttacacagggtgagaactctgtctcagtcgacgggaagtgcagtgactccacgctactgagcaacttgttagaagagatgaaggcgacgctggccaagtgttgagagctgcctgcgagccccgcaccaccccgcggagcacgtacccagggaccgcagccctgacgtgtctcgcctctcctcagtcgtgtgtactgtacccaagcctgagtgttaatttaactctatgttgtccgccgtgtagacatccgaggtcatttgttgcgttgaattatctgaccatccttttttactgtgactcttcccattctctttggcaagaagtccccttctcgcccccaaaccagcaagggactcccccacctgggtctgtgccctgccccgcgctgggggccgagtccttgaatgtggcttcaggggctcctgtcctgggccagggcctgatgggcaccacgtgaggggcacttggtggacagggcggggctgacgtggcctcctctggggtcgcctgcttttgacccaaaggtcctgacggttgcgtccgggggaggggaaggaagggccgctgtcgccaaggttttctctcccagaacccacagtgggaaagcggtcttgccaggcgttgtccattgtcagtgtgctcgtgggctggtgactgggtcttgggatcccaggccacgcgccagccaggctgtgggcagggcggggccagggacgccaaagagaggttgcagtcagaaccgtggacggggtgggttgaggcctctctgccacccgtcttcctggtcagcagaagtgcatctcggcttgggtttggggtggtccgcatcccctgcttgccactatgcgcaccaaggtttccccacatccttcccagcacccttaggaaggcccaggcagggcctggaagcagcggacctgggctgttctgtgttgaaggagtgtgcccagtgcccttgggcaggacctgtgagagccacctcacaggcagagcccccaccaggcagggcaaggagactccgctcactccccacggccagcgtgggcacaggactgacccttcttcagagataatgacattttatcttctccttttgatgaaaactgtcactttagcatgtaatccattacagaatcccatgcagtgattccaggatttgaaattgtatgatgtgttacataagaatttatttgctatcgacattcccgtataaagagagagacatatcacgctgctgtcatgattttgtgtcaagatgatccaataaagttgtaaaacaggcatttccacatgggtcttctgcctggcctgggtcatgcagcgctgcaggactggagcctctgcacctcagctcacgggcccttgggagggggcctcggtccccagcaccatccaggcctggggctcgggcagtcacaggccagggagtcccccaccccgtggtggcctcggtccccagcatctccacccaaggccgtgcaggggagcaggtgcctgctttccctccccttccccaggagcccccggggcaggggcagatccagaattgagaaccgcggaagagcagccaccccacccctgggtgaatttgcctcctttacaccagccttacaccttgaagacgggagcctcgagcaaggtgacgctgggtcagtgaagggaagcccctgtccactctaacccaagacgcggccgtggtggcgggcgttggatgtcagggggctcagagcagcacagacgggaccccagccccggcccacaccagcatcctttctagaaaaccatgccttgaaagcacctgccgcgagcctctttgccgttacctaaacacgcttgccggcctcgaaagcagcatccttcacagccaggacccagcgccatcactcctgacactgtccccagtggccactaccacattctcccccaacatgcgtgtggctcccatgtcccagggagcctgggaggcactcggtgaccttcccacacgccgttcctgacctcagcaaatgtgcccgtgcacccctcccgtgacgggagcctgaggcggccacaagacagtgtgtgggacccatggtggcagcaacagtgtgctcgaggatgttcttgctggtgtcctgcagccgccccaatgccggagcaaagggacgctcgaggaagcaaggagactgccgggctgaggtcgcccgagtgagaatgggacttggagctgcgcccctgcacagatggaacacgactccctccctcctgtgtgtcaggccccatcagccagagtcaggccgtcgtggccccgactctggccatgatgccacgcctgtcactgccacagatgagacagcccatagttcctgcgttccttggctcgggtctgacgtaagtgactgcaacacctaaacgcactagtgctggccctggtctcaaccacactgtggcctcgctttgggtggaagaacccaggtgctctgtgggcttgtgtgagcctacccatgtgtgctcaggtgggccacggccccacacctaggagtccggggacactccctgaggccctgtgagtgtggctccaagtcggtccctcatggctgtggacccaaggccaggacctgccctgctctgtctgggacctttaggcctccccagaagcccacctccagcccctagaggcttccccctgccccaacaagaactcttctgcaaagagaaacatcagggactttaatcacatcccgcagctctgcggacctgcccaggcgctgatgctgcgcacagcccacccccattccctccctcccgccctcctggccctggccagctcagctctgtccggggtcggagagggggtcctgaggcagcagcagcccagctccagagtgacaggcaggggctgtccagctgagtctccgcccccacgttgccctggggcaggcccagctgctgtcagtgctgcttgagacactcagcagcatcttccaaggtcaggttggccaagtgtgggggctccagacaccttaaggctggcgataccaggctgcggggagacgaggctgcctcagctctccatgtcccccaccccctgcctccctccctgggggccccaggcctctcctcccagctgggacgtgtggtcctatgtgtggccacatccacgacaccctcgtgcctgggatgtcagcagggtgtgcaggccgcggcacgctggtgttggcttacgagcaccccttctcccgaggcctcccttctctgggtcactcacaaggccggggtggctctgtgtgtcccaggccaggagaaggcagaggagcgtggtctgttcatgaaaccaccacatgggtgtggttgcagaggtgacatccagcaggtgtcccaggtatagggagagccccacctgcagtgcccccactgatctagaggaccccctagcccccctcctctctccctttaccccctccccctgaagtccaggtcagggcggccttacctcatgctcgtgtcctgtctgaaaggcaatgtggggcagtcagcccctccatggggcacccctaaccatcgtagggaaccctcccaggctctgaccacagacctgggatggggtggaaccagaccctatggggaccctttaggaaagatgcccgcctccagctgagggtcggagacctttgagggagaaaaggactgcagccgcctcctgcgcagagctgggttgaggttccacctcctcgggagcccctctaggacgtgggagctgagggagccagcctgtgccccacacatactcacccacgaggtgctcacatacacacactgcctgtgttggtttgaggaggggacttacttgtgccagttatttctacaaagacagtgggtttggactcaggaggccgagtggccgtggccagtgttccctcccaggcccaggtgagcttgctgccacccaaagaccccactcacatgtagttcaggaggccctggacagctgacttccactgcgccgaggacctgtgggacacaggcttggaagtggtgcgcccctgaacccacggccccgccctacccgatgacagccaggtggaaggcggggagccccctccaaggagagcctgggaccccagggacagtagggccctggcacgggtgggtgtgatgcctgagccctactcgcagttatagccaaagcaggcgacgtgcgagtctgtgcagttgttgcaggagatggtctcgtactggaagatgcctgaaacacgtacaagagccgccagggctcccctcagcctccagggccccgagctgccaccggcacgcccctcagcctggacggagccttgcttaccacagcggtgctgacagtcgatgcggcctgtgggagggcaggacagcgccatcttaccaggcccagccttgtccccagtcctgcctcctcccaaccctccaaagcctcagggcctgtccctcggcactggggcccaggctcacctggttttcatgtatgtgtgtccatggcccggagggaaggggtccccaggttgacccccagcgtgagatggagcaaacttcaggggagggcggtggcaacactcccagcgcctctgggggctacttaggggaggtccccgcggggtgatggcattgatccttcaggtgctaggctgggtccctccctggagagctgccctcctccccagctgcctggtgccaggtgccctgttcacatcactccagcctcagccaagccccgtgggtctccgaggctctgggcaacacctccctcctctgaagccttatttgctcactttcgatgatggcgttctggatgaggtgcacctgctcccggaagatgtttcgcagctcgttggggaaataccctgagtcgtcgaggcaggagaaggtcaggctcaggcggtgggcggggtgtcccggggtgggggggccccgcctcggtttcgcgccccttaccggggaagtacatcttcccctggtacagctgatccatcatctggtacactgctgtcgccacttggtccagcttctcccgggctgcgggcaggaggagaagccaggtgaccggcctgccccggggtctcgctggcggggtagtcgggactgggctgggctccggcactcactgatcttggcggggatggccaggtgcagctccttcatcgtgtcgtcgctccagtcggtgagcagcgcccctgacacggggatgtcgcccacccaccaggacttgaagttcacatggtggcggtagaaggagaacttcttggagaagttgctgtggcagtgcagacagccgtgggccagcgccgccgtcaggcacaccaggcacagcagcagggccatgcccgtcccggcccgccgccggccaaccaacgacgctgctcgcgccacacccttcagccgcgcaccaaccaacggcccccactcgggcgcttggccgtgtctcctcccccgcccgccccaccagcgcaggccccgccccatcccaggcccagccccgcctccgtcctcagccgactactgacggcgccggctccgcctccaggccccgcccacgacccgcccctcagaagactccgccactgggtgggccccgccccaaggccgcgccctacgcatgcgccaatggcccgtgcctgtgccaatggccggtgcccgctcctcggccggctcccgctgaggccccgccccgtgtcgcagccacggtgcaggctccgcccacaggccgcggccccggttgctaggcaacggagacctccgcccggcccggctcagggcatcccagggctgctgcccggaacttggctccgtgcgccttcgccgcccgggccccttaaagcccgcgggaccgagtctgggagacccctgcacgccgcttctgcgcggagccccgggccctttaaggaaagtaggtccggtccgcgggtgcggtcgggcatgcgtgtggggcgttcccgcggccgtgtccctccgcggcggctgcgaggcggtgcggcggctgaggcggccgaggcggccagttgggtaccgggaggggcgaaggcgggcggcagaggcgatcaggtgggtgtccgggaggggcgaaggcgggcggcagaggcggccaggtgggtgcccgggaggggtgaacttaggcggcgaggagaccgagttctcaggaagggcgaaccctggcggcggggaagctggatccctcagacgggcgaacttaggctacggggaggccgagccttcaggaagggcgaggccgggcgcggtggctcacgcctgtaatcccagcactttgggaggccgacgcgggtggatcacctgaggtcgggagttcgagaccagtctggccaacatggtgaaaccccgtctgtaccaaaaatacaaaattagccggacgaggtggcgcgcacctgtaatcccagctgctgaggaggctgaggcaggagaatcacttgaacccaggaggcagaggttgcagtgagccgagatcacatcactgcactccagcctgggcaaccagagcgggggaaaaaaaaaaaagaacaaaagaaaaaagaaaaaaggaagggcgaactcaggcggcagggaagccggatccttcaggaggggtgaacttaggcggcgaggaggccgatcccccaggaggggcgaacgcgggcggcggggagaccgattaccccggagggggatacagggtgcggggtcgagctgcgggggtgaactcctggccctgcccgctgccctcccgcaggaccccgcacctcccggtgtggattaaaattctgcagggcttcaggatccccaagccaacgcggcggtcgggccctttcgaataggcccttcttgctcggggtccccaaagtcgctggcagggcccccccaccccggaaggaggcgcccgccagggacaagctgcccctcctccctgcagcgaagaggggctagaaagtgtaagcgagggtgcattttattaggagtcactgagaggggaggggaaattggaaaatgcagtcacagagcagaaaatcagtgctccaagccgcagctcatcctgggggtaagatttccagtctttgtacacactgtttttttgtttgtttgtttgtttgtttgtttgtttttgagacggagtttggagtctcactcacgcccaggctggagagcagtggcgcgatctctgctcactgcaaactctgcctcccgggtgcaagtgatcctcctgcctcagcctcctgagtagctgggattacaggcgccaaccaccacacccagttaatttttgtacttttagtagagacggagtttcgccatgttggccaggctggtcttgagctcctgacctcaggtgatccgcccgcctcggcctcccaaagtgctgggattacaggcgtgagccaccgcgcccggcccacactgcttttttcgcacttgcttttttcttcgttttctccttaacagtttatacgggtttaattgacatgcaataaactgcccgtattcaaagcagatggttggataaatgttgacattgtgttttgcgtgtttcacatcccatctgtgctttctgctttgggagttgcctcctgcataggcagcggggagtgccctggccgccctctaggccgtggtcccaagaccgccttccttcttgtgcatcacgcagtcacaggggcttcccttttacggaagaggcgctgggacgcagagctgaggagctgctgaaggctggagccgtcagagcccacagtgatgccttgaggaactagtcattcatttccctgcgtgtgtgggatgatctaggttttgacccgtgagacaaaacccaccttccgtttctgttctcctggattcacttcctttccaggcctggtcttgctttcatgtaggggaagctggatgtttatttgttcggttggttggtttgctggttgtttcagaagtgcaagagggtggcccggcgcagtcgttcgtgcctgtgatcccaacactttgggaggctgaggcgggtggatcacgaggtcaggagatcgagaccatactggctaacacagtgaaaccccgtctctactaaaaagacaaaaaaattagccgggcgtggcggcgggtgcccgtagtcccagctactcgggaggctgaggcaagagaatggcatgaaccctggaggcgaagcctgcagtgagccgagatcgcaccactgcactccagcctgggcgacagagtgagactctgtctcaaaaaaaaaaaaaaaaaaaaaaagaacttacatagggaaggaaggagggctggatgagccccccgggctgtcagagttgcagagttgcagccctgagaacttccagaagccgggttcttaaccgcagttgtcagggacctgtttattagaactcactgagatctaccgattacagagtgagaactaagaaagtgaaatcccagcatgtcacgtccctgtcctccggaccccctggatgtgtttccctttccccagggacgacacaggcacccacctcaagcaacacccgttccactgcacccttcccagctccctctctttccacaggttgatttttctcttttaactctggagctgagcttactacctgtggctgtggaggccttgcaatgtggctggtccgaattgggatgtgctggccaggtgcgggtggctcatacctgtaatcccagcactttgggaggccgaggagagcagatcacctgaggtcaggcattcaagaccagcctggccaacatggcaaaaccccatctctactaaatacacagccaggcacacgctggaccacagccacccactgtgtgttccagagacttctctgggattccgaaaggcagaagtgaaggcctcctcccagaatcccgtttctgaagtcggatttgccttttcagcttaagccatttgaccttctaaatgccaggaagacaggaacagagctcatcggctgaggaatacaaaatttacccgggcatgctggcgcgtgcctgtagtcccagctactcaggaggctgaggcaggagaatcacttgaacccgggaggcggagcttgcagtgagccaagatcacgccactgcactccagcctgggcaacagagtaagacaacgtctcgaaaaaaaaaaaaattcccttccaaggaggtatcctcccaccttagggacctgatggtggaggtttcagaaaaattccccacacagctgactgagcttggggttttaaggtggggagttttagaccttccccagccgatgagctctgttcctgttttcctggcatttagaaggtcaaatggcttaagccgaaaaggtaaatccgacttcagaaacgggattctgggaggaggccttcacttctgcctttcggagtcccagagaagtctctggaacacacagtgggtggctgtggtccagcgtgtgcctggctgcacacaaaagaaagctgaacttgggttttctttcagactttgacacaataccttctggggaccatgcctggcctcttcccttttcctttttttttttttttttttttttgagatggagtttctcttgcccaggctggagtgcagtggcgcaaccagggcccactgcagcctccgcctcctgagctcaagagattctcgtgcctcagcctcctgagtagctgggattacaggcatgcgccaccacgcccggctaattttttggtgttttagtagagactggatttcaccatgttgcccagctcaggcagtctgcctgcctcagcctcccaaagtgctgggattacaggcgtaagccaccgcgcctcacccccttttccttttgagtatatcaaaatgactgtttttttccttatatacccagactgggaaaagtatgtcagtttaccacaaagattcacagagggtcgggcgctatggctcatgcctgtgatcccagcactctgggaggccaaggcagaaggatagcttgaacccaggagtttgagaccagcctgggcaacatagtaagaccccatctctaccaaaaatacaaaagttagctgggcgtggtggcgtgcacctgtggtcccagctacttgagaggctgaggtgggagggtcatttgagcccaggaggttgaggctgcagtgagccgtgattgcaccactgcactccagcctgggggatagagcgaaacctcatctcaaacaaacaggcagctaaaaaaaaaaaaaaaaaaaaacctttccttccagacacaatagttccttattttttttcatggttgtagcaatttattattctttctttctcttttttttttctgttacagacagagttttgctcgtcgcccaggctggagtgcagtggcacaatctcggctcactgcaacctccgcctcccaggttcaagcgattctcctgtctcagcctcctgaatagctgggattacaggcgcccgccaccacgcctggctaatttttgtatttttagtagagacagggtttcaccatctcggccaggccagtctcaaactcctgaccttgtgatccacctgccttggcctcccaaagtgctgggattacaggcatgagccaccgcaccccggcttttattccttctttaacaaaaaaggtcttagagcctgggcgcagtagctcacgcctgtaatcccagcactttgggaggccgaggtgggtggatcacttgaggtcaggagtttgagaccagcctggccaacatggtggaaccccgtctctaccaaaaatacaaaaattagctgggcgtagtggcgggcgcctgtaatcccagctacttgggaggctgaggcaggagaattgcttgagcccgggaggcagagcttgcagtgagccgagattgcgccactgcactccagcctgggtgacagagcaagactcggtctccaaaaaagaaaaaaaggtctgggtatccatactgttttgcaacttattttttgcacttatcggatattgggtgtccttccgtgtcagagcctgtgtctcattcttcttaaaactgtgtggccgggccgtcctgggttacacaaggatgagaagtctcctctgggttgagaggttttggctcaagtttaaggcttttctttccagccagatgggcttgggaatgactctgcaggaagcgcgtgttcccctgatctggccagcagccggcactggaatcttggttgtagggttacttactgcaggggtcagtttcacggaggtttccctcccttttcttccccacaggttgtgggttttctcttaggtcttctggctttaatgcagagctttatattcagcttattagttttaaaagtgtgttaaaataatgcacgtattttggccgggcgcggtggctcacgcctgtaatcccaacactttgggaggccaaggtgggcggatcacgaggtcaggagatcgagaccatcctgactaacacggtgaaaccccgtctctactaaaaattcaaaaattagctgagcacggttgcaggcagctgtaatcccagctactcgggaggctgaggcaggagaatggcgtgaacccagtaggcggaggttgcagtgagacgagatcgcgccactgcactccagcctgggcaacagagcgagactccgtcttaaaaaaaaaaataacgtatttgtatcattgctatgtttaatgtcgtatttcattgaccataagtcccacagggaaggaggaagttgttacttcctgtgtggggctggggccagggtctccccctgggtattgagtcattctctggggtggagtgtcctgggcactgcagggtgctgagtagcgttcctggcctccacccactccatgccaggagttcccccaaaacctgacaaccacagatgtccccagacatcgtccggtgttgaggggcagaatcttcaccgtgttcaggcctgtgggggcagggggcagggtggtctatccctgactcagcccgccaacatcctctgggccacgaggcaaatgagaagaaaaaggaagtggtcgggggtgtgagccactccaagcacagacaattcccaccggggacaaagggatgggctgagctgggacacctgggtggggagtcgcaccctacgtgccctggagaaccaaggcagcctgagtcaccatgccagctctgccgggctgcagatgctggtttcagaagcgcctggcagctgcggagctctggggatgcggacttggctgggctaagatggatcgggtatcggggcccccagaatcccctcagtggagtccctggtagattagatcagaggggaagctgccaatctagctgaggtcttgccccagggcagttttgcccccaggggacttggaaatacggggcagtgcggggggtgcatttgtgtttgtcacaactagaggaggggctgcccctggcatggagtgggtggaggccagggacattgctcagcacctgcagtgcccaggacaaactcacccagagaaggatccagccctgaatgccaagtgggggactgcattagttatttgggaaaaaaaaatcaagtctgctccctgctcacaccagacaccagaataaactcccaatatggcagacggtgtaaaccaggggacctcagctcctgggattctcttcctctccccctctgtggatttcaatgtgtgtagcctcctgggacctcagcagagcagaggatcatgggccacggagtctcttgggggtccgtggaatcccctaacccaagaggtgtcaattgagggtaattctgcccccaggggacactgggccaagtctgggacatttgtgtttttctcatgactgggggtgctcctggcatggagtgggtggaggccagggacgctgctcagcaccctgcagtgcccaggatggcccctccccagagagtgacccacgccgatgtccacagtgcagagagtggaaacgctgccctagtggcagacgcagcagattcagaattgaaggatctgagttcaagcccagacttgtaccttttacctcccaccctcaggcgaggcaactggcctcagcttctggacgtgcagcacgggtgagcccctcccgccagccaggaaatgatgagtttcacgagagcaggtcctccagggccccagcaaatgccaggcctgtttactaatgacagcaaaggtccaccatcacttagcaggaatgagagcattcgctttcagcctgccctgccagcctcacagggctgcggcatgaacccctgtagggttagtttatgagtgcgtagggaagtgctccccagaaagcaggagaaacacggatggccagatacacgtttgagcctctgacaactacagtcactgtgtactaactagtggtgaggttggcaatttgtaaaaattactcattaaagagggagacagagccaggctccgtggctcatgtctataatcccagcactttgggaggccaaggtgggaggactgctcgaggtcaggagtttaagaccagcctggacaacatagcaagacccccgtctctacaaaaaatacaaaaattgccgggtgtggtggctcatgcctgtaatcccagcactttgggaggtcgaggcgggcggatcatgaggtcaggagttggagaccagcctggccaatatggtgaaaccctgtctctactaaaaatacaaaaaaaattagctgggtgtggtggtgcgcacctgtagtcccagctactcaggaggctgaggcagaagaatccttgaacccgtgaggcggaggttgcagtgagccaagatcgcaccactgcactccaacctgggcaacacagcgggaccccatctcaaaaaagaaaaaaaatagaaaaattatctggacgcacgccaggagtcccagctacgcaggaggctgaggtgggaggattgcttgagccccggaggttgaggctggagtgggctgtgattgtgccactgcactccagcctggatgacagagcaagactttgtctcaaaaaataaaataaagcaaacaagaacagttagatccccggccttgccactcgcaggacaagctttgtccccctcggcactgtggacattcaaggctgattagtctctggggtggggtatcctgggcactgcagggcactgggcagcatccctggccaccacccactctgtgccaggagcatcctccagttatgacaaccacaaatgcccccagacatcacccagtatgagtccccggggtgcagaatcgccccccaggtgagacccccactgcagctgagtgtggctgagagctcttcacagtggccacgaggaggcgagactggggtgggcccctggctcccactgggcgggctcagagcatggctcctgcccccgcgttcagactgaagccatccaggaggccaagaaggcggtgccaagtcggtggtgcccagtcaagcccagatcctgcggccctgggttaggaaaaagttccgtgaaaggagtgtggccctgggttgggatggtagcttggggcgttcctccctgtggcttcctctttctgacacttggtctcttgtctcttgaaactttgggctgagtcctctgaagcaggcaccacaggtgtccgtgacgtctcatcactgtaactgtcccctaggtgacacgatcttagctttgttttgagacagggtcttactttgtcccccaggctgcagtgcagtggcacaatcatagctcactgcagccttgatctcctgggctcaagcaatcctcccacctcagcctccaagtggctgggactatacaggcacatccaccatgcctggctaatttcttaactatttcgtacagagatgggtctcactatgttgcccaggctggtcttgagctcctggcctcaagcagtcctcctgccttggcctcccaaagtgccaggattacaggcgtgagccactgcagctggccagggcttcttttaggggtgaggaaagtgttctggaattagataaaggtggtgtttgcgcaacgccaaacgtgccaggagtcacgtaactgtactcctgaactgtaactgaaaaggttaaaacgtgtgggatgtgagtcatatgtcaatctaaaaacagaagaaaagactatcaggagaattaggacagtatgctaagccctcgatagcacctggcccagaggggcctgggcaggccttgcttcctgcctgtctgctttcccacgagagaagtcagagatgcagtaggcacagtggctcacacctgtaatccctgcactttgggtggctgaggtgggaagatcgcttgactccagaagctcaagaccagcctggacaacatagcaagaccccatctctacaaaaatacaaaaattatacaggtgtggtgttgtgtgcctgtagtcccagctactcaagaggctgaggtgggaggatcacttgagcccgggaggtcaaggctgcagtgagctgtgattgcactactgcactccagcctgggcaacagagcaagaccctgtctctaaaaaaaacaaaaatgtaaaccagacaaaagcacaaaacagtgacaggatgcacgcctgggtgatcagggaagacgcagccatcctccagcaggagtgagggtggcctaccagcaccaggagcagttgtaacgtttaaaagtaaaccctcaggccaggcatgctggctcacgcctgtaatcccagcactttgggaggccgaggtgggcagatcacctgaggtcaggagtttgagaccagcctggccaacatggtggaacagtttctcctaaaaatacaaaaattaggcaggcatggtggcgtgtgtctgtaatcccagctatacaggaggctgaccaggagaatcgcttgaacccaggaggcagaggttgcagtgagccgagatcacgccactgcactccagcctgggtgacagagcaacacttcacctcaaaaaaataaaaataaaaaagtaaaaataaacactcagaggctgggcgttatggttcacgcctgtaatcccagcactttgggaggccgaggtgggcagatcacttgaggtcaggagttcgagaccagcctggccaacatggcgaaaccccacctctactaaaaatacaaaattagtcgggcgttgtagcgggcacctgtagtccctgttacttgggaggctgaggcaggagaatcgcttgaacctgggagacagaggttgtagtgagctgagatcgtaccactgcactccagcctgggcaacaagagcaaaactccgtctcaaaaaaataaataaatgaaagtaaaaataaataaatactcagattttggaaggtggctccgggatgctgcctttttttttttttttttttttttgagacagagtcttgctctgtcgcccaggctggagtgcagtggcacaatctccgctcactgcaagctctgcctcccgggttcaggccattctcctgcctcagcctcccaagtagctgggactacaggtgcccaccactacgcccggctatttttttgtatttttagtagagacgagtttcaccgagttagccaggatggtcttgatctcctgatcttgtgatccgcccacctcggcctcccagagtgctgggattacaggcgtgagccaccgcgcccagcgccttttttagcaggacagattctgggctgggagcatcttccagccaagtatgagggctgggctgccaggccgggagccagtgttgtgcactgacctagaacatatggaactgacttctccactcagggcttgtctctcaggcgcctcccgtgctctggggcagcggtccccgaggcagtggcaggatgtggaaacctccggaaggaagtgggtgactgtggtccgtgagctgctacacctcggtgggggaggggtcataccagttggttgcttagagaaactgtgttgttcaaaaaaaaaaaaaaaaaaagtgttgcagcaggggaatttgtcatttcacctttcatttctctagaagtttccaagggtcacttgtgtctcgtccgtgggaagaccgggggagcccagaaggccttggtgtggaattctgagagctgattcctgccttgtcttctccactgttcctggaggaatccgagaagagcagagcggagggagccccagacacggtaacctgcccccggcctcaggggacaacgagggcgggagtcagggtcccgaggccaccccggcctttctttggaaaagacccctttctgtggccaatcacccctccgccaaggagcctgtgtttgttcctgatagaaaacgctttgctcgggccggacatggtggctcacgtctgtaatcccagcactttgggaggctgaggtgggaggattgcgtgaggccaggaattggagagcagcctaggcaacatggtgaaacccctgtctctaaataaaaaaaaaactaggccgggcacggtggctcacgcctgtaatcccagcactttgggagggcaaagcgggcagatcacgaggtaaagagtttgagaccagcctggccagcatggtgaaacgccatctctactaaaagtacaaaaattagctgggtgtggtggcgggcgcctgtagtcccagctactcaggaggctgagacaggagaattgcttgaacctgggaggcagagtttgcagtgagccaagatcatgccactgcactccagcctgggcgacagagtaagatcctgtctcaaaaaaaataaaaaggaaaaaaaaaaccgtctgctgtgacgggaactctgccagtccacaaggttcttcagaagatgttaacttccactgaaaatcctgcacctttttctttttgtgacggagtctcactctgtcaccagggctggagtgcagtggcgtgatctcagctcactgtagcctccgcctccctgggttcaagcgattctcctgcctcagcctcctgagtagctgggattataggcacatgccaccacacccggctagttttttgtatttttagtggagatagggtttcaccatgttggccaggctggtctcgaactcctgacctcaagtgatccacccacctcggcctcccaaagtgcagggattacaggcatgagccacctcgcctggcacccctcaccttctgaaaggagacagacatgccaagaggaagtttacaagctcctcgggctgccctgtcttgttttctggaactgtcttggtgtgagtctggtagacaagcttaaaaggatatagacaaagataagcctcagccaggcacggtggctcacgcctgtaatcccagcactttgggaagctgacgtaggaggatcacttgagaccaggagttcaagaccagcctgggcaatgtagtgagaccctatctctacaaaaagttttaaaaagacaagcgggggcctgtgggaacagccgctttctccctgaggctcagcccaggtagggggtctcctcccatggctgcagtcagcccagggctgcaataccactgctggaaggccccgcctgcccaaccaggtggcacggttggaagctaagcccccaaattggcatgggaggccctgaaatcaacaaacggcagcaccaggctgtggcaggttgggttttgctctgtgctgtgatttctgttggagttggaaagttggctgtgagtcggcccagatgtgaagcggaaacggggaggagggaggtgagtgggcctggctgggtggatggggatctgctcgcctgcacggtttcctctttggtaaagtggggcctgcactcgccccatctagacaggcatgtggggactgaggtgattgattcccagcgtggaggagcatctcgctcagtgccaggcggaccatggcctggaggtggccggcattttcccttctcctgaggggatttattgatcttgtgctgcaggtggtgtggcctgagggcaggtgtggcttgcagagctcatcactggggcaggtgcagggctctggggtgctgagctgtcactggcgaagggcctcaggtcccccccaacagctcccacctgctcagccacagcgtggatgcgtcccgggctccccggccccgggggataccataagcacagaggtggcctctttgaatcaggggcttcccagggagggtctgaggctgggctgcgggattactccttccttgggaagcaggcaggggtggccaggcacagtggctcacgccagtgatctcagccccttgagaggctaaggcggatggatcgcttgagtccaggagttcaagaccagcctaggcaacatagtgagctcccgtctctacaaaaaatacaacaacaacaacaaaaaattaactggtggtgaaaaaattataaaaaattatggcagtgagtgcccgtggtcccagctactcaggaggctgaggcaggaggatcccttgagctaggaggtcgaggctgaagtgtgagccatgatcctgccactgcactctagcctgagcagcagagcgagaacctgtctctaaaaatggaagagaagcaagcggggggacctgtgtggtgaccctggggttgtgccccgccgagcaaaaccaagatgggtcagcagtccctggacttggagcatccacgtggctctgctaggcagtggaggggccccgtggtggagcagcgctggcccgggaagcgtgtgtcactaggcttgtgatcagacggctgcctgcatccctgagagttgctgaatttagggagttgtggggcagaaagagcggtggcttcacccacagagtccagggttcgagacccggccgatccacccacagagtccagggttcgagccccagccgatccacccactagctctgtggcgtgagacactgctgtagaatcagtcataatcatctgagccacgatctcacccagggcgatctaatcttaacccaaagggacactgggtgatgtctgggcacatctgtggttgtcataacttgggggagctcctggcagggaggggcggcggccagggatgccgctcagcaccttgcagtgcccctgacggccccaccccagagaacgatccaaccccgatgtccacagagccaggggttagaggcctggttttctgggccctggttttctcatctgtaaagtggagacagggtttttgtcccaggcagatgaaaagttcaagttcctagttgggtgttaaccctggtggcaggaagtgacgatggtggctaagggccccaggatgggctggggaagttcaggcctttctggtcactgcagcgtgggtgggactcaagtcctcctgccacctgtgcccaggctgccctgagcagtgtcccccagccggtcctcaccaggggctcccttgtgacaaaccattgaccctggaccttcttatggtgcagactctgtcgtcactgcgttcacagtgggcaccgtgttgtgttgtgttgtgtttttgagacagagtcttgctctctcacccaggctggagtacagaggcccgaccttggctcactgcaacctctgcctcccaggttcaagcgattctcctgcctcagcctcccaagtagccggaatttcaggcatgcaccatcacgcctggctaatttttgtatttttagtagagacagggtttcatcatgttggtcaggctggtcttgaactcctgacctcgtgatccgcccgcctcagcctctcaaagtgctgggattacaggcgtgggccaccgcgccaggcctgttttgttttgttttgaagcagaatctcgctctgtcgcccaggctggagtgcaatggtgtgatctcggctcactgcaacctttgtcccccgggttcaagcgattctcctgcctcagcctcccgagtagctgggattacaggcgcccgccaccatgtctggctaatttttgtatttttagtagagatggggtttcaccatgttggccaggctgatctcgaattcccgacctcaggtgatccacccgcctcggcctcccaaagtgccgggattacaggcgtgagccaccacgcccggcctctaacttgctttttttccaaacaatgcagcatctcttccccccgacccccaggccctgtgaacatttgggtccagatcattctctggtgggggccgttctgttgactgttggggggtaccctaaccctaagccctggggcctccagaaggatccagctctgctcacaccttattttttattttttgagacagggtcttactctgttgcccaggctggggttcgaggctcactgcagcctcgaactcccgggctcaaacagtcctcccacctcagttctgggattacaggcatgcgccactacacccagctaatttttaaatttttttgtagagacgaggtcttgccatgttgctcaggctgacctcaaactcctggacgcaagccatctacctacctcaccctctcaaagtacttacaggtgtgaaccactgcacccggcctgtccacaccttaaatttagccctgcaggatccattcccaacagctgagagcttccccgtgctagattggtgttgttttcagcctgaaatttgtggtgatttgtgatggcagccccaaacactcgcccagtcatgtatcgtgagggatgagacacaagacaggacttcgtcacaagcaacagcaacacagccgggcgcggtggtgctcgcttgcaatcccagcactttggaggccaaggtgggcggatcagatgaggtcaggaattcgagaccagcctggccagcatggtaaaacccgtctctactaaaaatacaaaaattagctgggtgtggttgcacgtgcctgtagtgccagctactcgggaggctgaggcaggagaatcgcgtgaacccgggaggtggaggctgcagtgagctgagatcgcgctactgcactccagcctgggtgacagagcgagactctgcctcaaaaaaaaaaagaggtgggggttggaatgtactagaacgtgatgaatgtgtgtttattacttgtgagcgttgcgtggagcccaggaggcctgggcatgtgtgggcctcactccctctcccctctctgactcccccttctgctgggtcctcttcatgctgtggtgaggacccccgccctgcccagcaccctgcgtgggccttgccccaagtgtcacagtcaagtctctgcccgtccagaaggtgcacccagcagagcagggtggggtctgcatccactctgggcctgccacggtgccggcgtcctggcagtgacaataacggtgttggcggtgacaggccctgcgtggtgagcgtgagcccggcacacgcgcggtgtgtgatccaggtcgcccctccgccctgtgcgggatggactctgtctctgtcccctgagaattctcaggggagtaggaggacgccgggtccccaccccagagcaacccgtgggtgtctcacaagtcaccgctcaggcgtgcatgagacttgggccggctcctggaggcttcctcatttatacggtgccttggggtggacagctgcccctggaatcacccggcatctcgccatgtgacccgacctggaagggggtctttgtggatgaaatcaagggaagaggggtcacccaatcgtggggtccctgacccagtgaccagtgacttgggcacagcaacatggggagaatgctgacacgatagggactcattctcagttctggggctgcacgtctgagacgaaggtgtgggcggggctgggtccctctgaggccgaggggcatctgccaggcttctctctgctcctggcggtggccagcatcctgggcgacccttcgcttgtggaagcagcacccccatctctgcctgcatcctcgcacagccgtctcccccgtatctgcctcactcctgaggatgtttgtcactgactgtggggccacccaaggaatccaagatgacgtcccttgagaccttcttccacctaggctgccatgcacaggctgcgggcattgcggtgtggcttcctttgtggaggccgtagtccggccatgcagtcccctgtgactggcatctcagcctgccccacactcaagccccacagtgctgggtagcagcaagtctaggtccgggccaggcatcggcaccggggaagatgcggcccctgcgggctcttggggcccggctctgcgcaccttctgctgtgaatcggtcaggcctcgccacgcgcagttctcttctgtccactgaggaggtggccccctttgggtgaaactccttaaagtcaaaagtccaggggatgttttgaaccctgccactagtggctcacacctgtaagcccagcactttgggaggcagaggtgagaggatcatgtgagcccaggagttggagaccatcctgggcaacatagtgagacctcgtttctactaaaaataaagaaacttacccaggtgtggtggtgtgtgcctgtagtcccagctattcaggaggctaagttgagaggatcgcttgggcctgggaggcagaggttgcagtgagccgtgatggcaccactgtactccagccggggcaacagagtaagaccctgtctcaaaaaacaaaacaaaatcctgccgcttgtgccctcagcacgagtttccgggaaattctgtcgcctccagcaggtcatgattcccctgtgtatttcaggtccgcgggagagctgtggggcttggtgagtgtttcgtggcctctcgggttggtcagcacccccagccagctggcccaggacccctctacagaagtccaggagagcaggcgtcaccaagatgtccaaccccttcctgaagcaagtcttcaacaaggacaagacattccgccccaagcgcaagtttgagccaggcacccagcgcttcgagctgcacaagaaggcgcaggcgtcgctgaacgccgggctggacctgcggctggccgtgcagttgcccccgggcgaggacctgaacgactgggtggctgttcacgtggtggacttctttaaccgcgtcaacctcatctacggcaccatcagcgacggctgcacggagcagtcctgccccgtcatgtcggggggccccaagtatgagtaccgctggcaggatgagcataagttccggaagcccacggcactctccgcgcccaggtacatggacctgctgatggactggatcgaggcgcagatcaacaacgaggacctcttccccaccaacgttggtgagtcagagctggcaggggctcggggatacagagccttccagaaaagtcagggaggccgagcacagtggctcacacccgtaatgccagcgctttgggaggccgagcccagggatcgcttgagcccaggagtttgagctcagcctgggcaacatagcaagatcccatctctacaaaaaattttaaaaattagccaggcatggtggcacacgcctttggtcgcagctactcgggaggctaaggtgggaggatcgcttgaggctaggaggttgaggctgcagtaaactatgatcgtgccactgtactccagcctgggtgacagagcaagaccctgtctcaaaaaaaaaaaaaggattccatttctgagtattctcctaagttgggctgctcttagtagccccccttcatcctgaatcactcctggtgactcctgtctcctcaccccaaagcagagaatgacaggatcagcatcaggcctggagtccttcgcagaggagacaagcacccctgccagtgctgggcccagtgttctcagtggtttcagaatcactgccatggagcccctgggcccaccaggatcatcaccccgttggcgggaccccctgcccagctcgatgtgtaatgcactgcatggctctcagggacaccccataaacgtgggtttgaggatgatcattagggcacgtccctccagagtacagcgtacctttcttttcttttctttttctttttttttttgagacagtgtctcactctgtcacccaggctggagtgcagtggcacgatctcggctcacttcaacctctacctcccaggttcaagcgattcttctgcctcagcctcctgagtagctgggattacaggcatgagccaccacacccggctaatatttgtattttttagtaaagatggggtttctccatgttggccaggctggtctcgaactccagacctcaagtgatctgcctgcctcggcctcccaaagtgctgggattacaggcgtcagccaccgcgcccgatctgccagcaatttctgtctggaagccccttgtcacatccaggagcaaagggttctggacatggacttggctgagtccgtggacccgtcccacccctctccctgcaggcactccgtttcccaagaacttcctgcagacggtgcggaagatcctgtcgcggctgttccgcgtgttcgtgcacgtctacatccaccactttgaccgcatcgcgcagatgggctccgaggcccacgtgaacacctgctacaagcacttctactatttcgtcaaggagttcggcctcatcgacaccaaggagctggagccactggtgcgcgggcttggggctgagggcgtgcggttacggtggggctggtggcccgtggcagaggaacccttccggggccaggaccctgactgcttgcggtcggcccagcagctggcggccccggctggagttgggccccggggaccctgctgatgggacaagtggtgaggtagctgggagggatcctgcgttctcccacggaacaaatgccggcgacaggtgcagtttcctccgcgccgccccgcgtccagctcactccgccttcaccgtcctgagctcaggtgtcccagagcgccgctcagtgtcccttatgaaagggatgcgagccggcacaagcagactccaccccgactttttttgtttgtttgtttttgtttgttttgagacggagtctcactctgtcacccaggctggagtgcagtggtgcgatctcggctcactgcaacctccgcctcccgagttcaagtgattctcctgcctcagcctcccaagtagctgggattacaggcacgcgccaccacgtccagctaattttttgtgtttttaggagagagggggtttcaccgtgttagccaggattgtctcgatggatctcctgaccatgtggtttgcccatctcagcctctcaaagtgctgggattacaggcgggagccactgtgcctggcctttttttttttttttttttttttggagatggagtctgcctccctcacccaggctggagtgcagtggcgccatcttggcttactgcaacccccaccttccgggttcaagcagttctcctgcctcagtctcctgagtagctgggattacaggcacgtgccaccacaccccgctaatttttgtatttttagtagagaccaggttttgccatgttggccaggctggtctcaaactcctgaactcaggtgatctccctgtctcggcctcccaaagtgctggaatgacagacaggagccaccgcacctgcctagattccacccgacttctgtagccagccgggtacctctgcatctgccctagcctgtctgctttccacgttaccaggttttatcgggagacgaacccagggaccagattcctcggtgtggggtccacatccctgaagccaatgttgcttcttgaaattggggcccacaattgtgtctcggtgatggggaccagcagtggagtgggtgcccgtgattcagggcctggcactggaacctgcccagaggctgcattgttccccaggctgctgggcgctgtatggatgtggggatcctgatgtgagagcgggaccccaccagcctccgagtagctgggaccacagccagcacgcccggctgattttttattgtgtgtagagatggggtctcactatgatgcccaggctggtctgaactcatggatgcaagcaatcctcccaccttggcctcccaaagtattcagatgacaggtgggagccaccactctcttacaactttaaaaaatggttaaaaatggacggacgaggtggctcccaccagtaatcccagccctttgggaggccaaagagggagaatcactcgagctcagaagtttgagaacagcctggacaacatagtgagacctcatctctacaaaaaatgaaaaaaatgagccaggcacagtggtgcgtgcctgtggtcctagctactcagggggctgagacaggagaattgcttgtgcctgggaggttgaggctgcagtaagccgagatcacgccactgtagtccagcctgggtgacagccagtaacctgtctcaaaaaaaaaaaaaaagaaaagaaaagattaaggcccggcgtggtggctcacgcctgtaatcccagcactttggaatgccaagacgggcagctcatgaggtcaggagttcaagaccagcctggccaacatggtgaaaccccatcgctactaaaaatacaaaaaattagctgggcatggtggcacgcgcctgtaattccagctactcgggaggctgaggcagaagaatcacttgaacccaggaggcagaggttgcagtgagctgagatcgcgccattgcactccagcctgggtgacagagcaagactctgtctcaggggaaaaaaaaaaattagccaggcatggtggtgggcacttgtgatcccagctactcaggaggctgaggcaggagaatcgtttgaacccaggaggtggaggttgcagtgagccaagattgcgccacagctctccagcctcaatgacagagtgaaactccgtctcaaaaaaaaaaaaagactaaaaacatcttcacataacttcctcatttttgtgcatcccctttcaggctttgctactggtaaacattttgctaaatttaaaattaatagttgcatactcagtggctctaaagatggtagtggggtcttcctcttttttctttctttttcttttcttttttctttttctttttttctgtattccagaactttccttctagtgtcccagtctgtataagacagggatcagcaaactgcagccctctggcctggcttcctgtttttgtaaataaagtttctggggtttttttgtttgtttgtttgtttgatctcagccactgcaacctccacctcacaggttcaagtgattcccctccctcagcctcctgagtagctgggactacaggcatgtgccaccatacctggcttatttttttgtatttttagtagagacggggtttcaccatgttagccaggatggtctcgatctcctgacctcatgatccgcccacctcagcctcccaaagttgtttttttcttttttgagacagagtctcgctctgtcacccaggctggagtgcagtggcgcgatcttggctcacggtaacctctgtctcccaggttcaagcgattctcctccctcagcctcctgagtagctgggattacaggtgcctgccaccatgccaggctaatttctatatttttagtagagacaggatttcaccgtgttatccaggctggtcttgaactcctgacctcaggtgatctgcctacctctgcctcccaaagtgctgggattacaggcgtgagccaccaagcctggctgtaaatacagttttattggcagcgaggtacacttgtgaggttaccatcgtctgaggtggcttttgaggtacaagacagagttgagccatcatgacagggaccgtctggcccacagatctgaaaatgctgactctctggcctcatggggtagcctgctgcccctggtctcaggtgtgccattgcctgtgtggtttttgttgtttgggtgttcagggaagcccccagctgccgtttctctgcctgtgcgtctccgtgtgtctgctgttcgcatcaccccttttaggagtggctggtgggagctgatgtcttgcttgctctttacagaaagaaatgaccgcccggatgtgccactgagagccccgcgggtctcccggtgcccgaaccgccgctggggcctcggagacttggaggaggacgctctggaaccatcatcccgcttctctccggcctgagcatctcagggagaccaggggccgagccgctgagcaggtgttggtcctcaggagctccaaccccggacggcagatgccttcctcagtctcgagcctcagtctcccgtctgggactaaaacgtgaactctgtaattctatgtgttactagcaaccggaaaagcccactgtgtttttaaaccacttccactttccaggaggctggatggcttccagggtcactccttgccctgggtggctcccaggctcctggaacttctgcctccacctcgctggggagcccccagggctgctgtggccacagccctgcctgggcctgtctctcaagggcacccagcttgctcggcctcctacatgtctcccgttggggaggcaagaggctgaggggcttccgagcccctgagagcggacatctcctcccgcaggcctttactccgcactccccactggcagccgctggtgtctcttcacacagaggcacaacctggacccaggcagcctctttcctccctccccaatctcttccatttttctacagatttttttttttttggtcatactagagacaggggtctcgctgaactcctggcctccagtgatcctccatcctcggcctcccaaagtgctggaatcacaggggtgagccaccgcacccagccctctctcttcctcaatgcactctgcttcttccgttcttccgaaacattcagctgactgtatccagggcttcctggactcctgggaccccacgtcctgcaccccggcttctgactcatttcctaagggcccctttgtgtatcataaagggtttgatttttatagtcacatttacaaccatcttgagatttttattttttttgaacggagtctcccactgtcgcccagactggagtccagtggcacaatctcggctcactgcatcctccacctcctgggttcaagtgattctcctgcttcagcctcccaagtagctgggattacaggtgtgcgccaccacgcccaggaaattattgtagttttagtagagacaagatttcaccatgttggccaggctggtctcaaactcctgacttcaggtgatccgcctaccttggcctccaaaagtgctgggattacaggcatgagctactgcacccggcctaaccaggctggagtgcagtggtgggatctcggctcactgcaagctccgcctcccagattcacgccattctcctgcctcagcctccccagcagctgggactacaggcacccaccgtcacacccggctaatttttttgtattttagtagagacagggtttcaccgtgttagccaggatggtcttgatctcctgaccttgtgatccaccagcctcagcctcccaaagtgctgggattacaggcgtgagccactgtgcccggccaagaatttttttatcgataacatagtgagctctctgcctcttcggaacgatgtccactttgcttatgatcaacccaagcaggactcttctctccctggacgcctctcccctggtctggaatcttccagttctgccagaattggcctttcccagatgctgcaaacttccagttgaacccctttttctgtgtggcccctggggctgcgagaccaaaatccatgagttctgtgtaccctagacctttggaaggtgagagcagggccctgagaaaaggcagccacctcctctccctggctgaacccctgccaccctactcctcaccagaattgtcagtggcctttcaccacagtggtccttcctgcctgagccctgcactgtcccagaccacacagaagtctggtcacctctgggcgcctgggatggtcaccgaagagaagcacgctgtccccgtctctcctggcttctgccagaaaatcgaacaagtgcaattaacacactgttactgccgaagcctgaaactcccaggacttgtccttgatccttccagaaaccaccaggtccggcacttggagccccccggagagggacctcccagccgagccctcaaagaactccatgaaatcaggaactgcttgatgaaatgtatctccttgtacctggaagatgaagcccaaacacccacacctctgtctcccccagggctcgggatgtctccagcagcccggccacgcagcttcccaggtgggctcggggaggtgggagcagggaccatctctgtcccctccaccctcactccatccacctcggagaccaccctcccccagccagatacggaataaaactacagacgcagacgtcggaataaatggtgtcgttttcctgccagtgttaacagggtgccctgtcctaggggtgagcctcaggctttggggctgagaaaatcttttttatttttctttctttttttttttttttagacagctactcagcttttctttctttctttctttctttctttcttttttttttttttttaaatcccagctacttgggaggctgaggcaggagaattgcctgaaccctggcggcagaggttgcagtgagccgagatggcaccactgcactccagcctgtgtgacagagcaagacgctgtctcaaaaaaaaaaaaaaagaaaagaaaagaaaatgaagcacaaaagtttttaccctgtgccaaggaacagatcagagggaaaagaccgaaggggtggagtccaggccagcccgtgactccctagcccgctgtggccttggacatggacaaattagcgtacactacaactttttattgacttgtttatttcattctctttcttcctttctttttttttttttttttttgagacagtctcgccgtcacccaggctgtagtgcagtggcctgatctcggctcactgcaacctcagcctcccaaggaattgggactacaggtgcccgccaccacgcccagctaatttttttttttttttaagatggagtcttactcttgcccaggcaggagggcagtggtgcaatcttggctcactgcaaccttggcctcccaggctcaagtgattctcctgcctcagcctaccaaagtgctgggattacaagcgtgagccaccacacccggccctaatttttgtatttttggtagtgacagggtttcaccatgttggccaggctggtctcgaactcctggcctcaggcgatccccctgcctcggcctcccaagtgtgggattgcaggcatgaaccactgtgcccagctgctttttgttttctgtatgtgaaaaatgtgggcattgggtgagtgagtctccggggtcccttccagcgtgaaacgtcgtgagtccggagcctaacggaagaccagctttggctcacgaatttggtattttgcacctcagcagcatggcagagaggggcagcccgggccccacagggtggacccttagccctgtgcccgtcagcgctgtgctgctgcacctcgcccctagagggcaccacggcgctgggaagggacaggctcctgttaggcaaagagcggggatcgggaaccgccttccagagaggctgctgtttcctagttgtttgtttgtttgtttgttctgagacggagtttcacccttgttgcccaggctggagtgcaatgatgcgacctcagatcactgcagcctctccctcccgggttcaaacgattctcccgcctcagcctcccaagtagctgggattacaggtgtgcaccagcatgactggataatttttgtatttttagtagagacgggatttcaccatgttgtccaggctgatattgaactcctaacctcatgatctgcctacctcggcctcccaaaatcaatgtggttttaaattttacttatttggagatggagtctccctctgtcacccaggctacagtgcagtggctcactgcaacctccacctcccaggttcaagccagcctcctgcctcagcctccccagtagctgggactacaggtgcaagccaccatgcctgggtaatgttttatatattagcagagacagggtttcaccatgttggccaggctggtctcgaactcctgacctcaagtcttgaactcctaacctcaagtgatctacctgcctcagcctctcaaagtgctgggattacagccgtgagccaccctgccaggccagccacacagtctgttgtgtaaataaagttttattggcgcacagccatgctcatacatttacatattatttacatattgtctgtggctgtagagttaaccaacagagaccatctgctccacagtgccatttttttttttaaagggagtcttgctgtgttgcccaggctggagtgcaatggcgtgatctcagctcactacaacctccgcctcctgggctcaagcgattctcctgcctcagcctcccgagcagctggtattacaggcgcccgccaccacccccagctaatttttgtatttttagtagagatggggtttcaccatgttggccaagctggtctctaactcctgacctcgtgatccacccaccttggactcccaaagtgttgggattacaggcgtgagccaccgcacccgacaaagccaaaaatattgacagtctgccccttacagtaaaagtttggtgaccaagccaggcatgatggtgcacctgtgattccagccactcaggaggctgaggcaggaagatcacttaagccctggaggcggaggctgcagtaagttgagatagcactactgcactccagcctgggcaacagagcaagaccctgtctcagaaaaaaagaaagcgggggaggtggggagagagagctgacattgaaagattttcaataaatagtgttaggaaaaaaaataaactgatcatatgtaaatatccctgctcttaattgaggtgagtatcaagtgaaaaaagaaaaagtttgcggacgcctatagaaatacacagaaagatggcctggtgcggtggctcacacctggaatcccagcactttgggaggccgaggtgggcggatcacgaggtcaggagatcgagaccatcctggctaacacggtgaaaccccgtctctactaaaaatacaaaaaattagccgggcgtggtggcgggcgcccgtagtcccagctactcgggactacactgccactgcactccagcctgggtgacagagtgaaactccatctcaaaaaaacaaacaaacaaaaatatacagaaagatcctcctgttaaaatgtgaagaacccctcatatccagtaaaaatcaacacaaaacattttcttttcagataatgtttgcataactccatgaatttataaatacctctgaactatacacattttttttttttaaacggagtctcactctgtcacccaggctgaactgcagtggtgcagtctcagttcactgcaacaatccacctcctgggttcaagcgattctcctgcctcaggttcctgagtagctgggattataggcaccagccaccacacctggctaatttttttatttttagtagagacggggtttcaccatgttagccatgctggtcttgaactcctgacctcaggtgatccacccaccttggcctcccgaaatgctgggattacaggcatgagccaccgcaccgccctgaactgtatacattagtgggggaattttatgagatgtgaactatgtccccataaaattgctgtaacaaagacatagactggcagaagcagaagcttaggcaaagtttttatgtatatatataattttttcttcagacagggtcttgctctgtcgcctaggctggagtgcagtggcacaaatcacagctcactgcagcctcaacttcctgggctcaagcaatcctcccgcctcagcctcctgagtagctgggcctacaggcatgtgcctccatgcctagctgattgtgtttcttttttgtagagatgaagtctccctacattgctcaggctgatcttggactcctggcctcaagcgatcctccctctttggcctcccaaagtgctgggattgtagatgtgagccattgttcccagccagcataattatatcaaataaagcaaaccaggaggaaaaagcaattgcaatcctttttttttttttttttttttttgagacagagtctcgctctgtcgcccaggctggagtgcagtggcgtcatctcggctcactgcaacctccgcctcccaggttcaagcaattctcctgcctcagcctcctgagtagctgggattacaggcacctgccaccacccccggctaatttttgtatttttagtagagacagggtttcaccatgttggtcaggctggtctcgaacacctggccttgtgatccacctgcctcggcctcccaaagtgctgggattacaggtgtgagccactgcgccgggcctttcttttttttttttctttttttttttttttgagacagagtctcactctttcacccaggctggagtgcagtgaaacaatcttggctcactgcaacctctgcgtcctgtgttcaagcgattcttctgcctcagcctcccaagtagctgggactaccagcacccgccaccacatccagctaatttttttgtatttttagtagagacggggtttcaccatcttggccaggctggttttgaactcctgaccttgtgatctaccagcctcaactcccaaagtgctgggattacagacatgagcctccacacctggccagcaattgcagtcttaatgatcaaggtgaatccaaatgtatatgggacaggctgggcacggtggctcacgcctgtaatcccagaattttgggaggccgagacgggcggatcacaaggtcaggagatcaagaccatcctggctaacagagtgaaaccccgtctctactaaaaatacaaaaaaaaaaaaaaaattaatccggcatgaggcggagcttgcagtgagctgagatagtgccactgcactctagcctgggtgacagagcgagactctgtctcaaaaaaaaaaaaaaagtatatgggacaaagtacactcattgtgaccagagggaaaatgtacaggaaagatacgttagtcagaaaacttcatgtgctgaaatacattatataaaatacaaattaacatttaaaaatcatggtaaatgatttaataaacattttatgtatgtacttatttattttttattttttttattgagacggagcaggctggagttcaatggcacgatcttggctcactgcaacctctgcctcccgggttcaagcacttctctacctcagcctcccgagtagctgggactacaggcgcccaccaccacgcctagctaatttttgcatttttagtagagacggggtttcactatcttggccaggctggtcttgaactcctgaccttgtgttctgcgtcccttggcctcccaaggtgctgggattacaggcgtgaaccaccacgcccggcctacttactttttgagacagagcctctctctgtcacccaggctggagtgcaatggcgccatctcagctcactgcaacttctgcctcctgggttcaagcgattctcctgcctcaccctcctgagtagctgggattacaggcgtaagccaccacccagctaatttctgtatttttagtagagactgggtttcgccatgttgaccaggctggtcttgaactcctgacctcaggtgatctgcccaccttggcctcccaaagtgctgggattacaggcgtgagccaccgcacccggcctgggcatcttcattgatttgtaattcacattccatacaattcactcatttaaggtgtacaattcagtcgcatgtagtacattcagaaaagtgtgcaactaccacctccaattctacagcattctatcacctcgagaagaacaaaccttgtccccatcagccgtcactccccgacacccacacatcccctccctgtctctggatgggcctgtcccggacagttcatagaaatgggatcacacactgcgtggccttctgagtttggcatctgtgactgagcatgatgtcctccaggttcacgctgtggcctggctccggttcgtcatgggataatgttccagtgtggatggaccatccgtcccctcctgccgggtgttcaggccgtgctgtcctctcggccaccaggcatcaggtgcccatgtgcgcacacggcccgtgtcccgcgtgggtgtcttgtgtggctgctgtttatgctctgtctctgctgaccttctggtgccaccgcctggtggccgccccggaggcgtggcccacgttcctcgatatttctggagctgtctgcccttctttccaagccagagaagcagatgggaaacaaaagcagctgcccgccctccttgtccccgccacaggcctacgcatcactggatgggatcctgctcccgggaaggccggcaggagaacggctccgtctgtctggcctggaaagcagctcccgcgctgccccacccgccgccaggccactgcgtcctcgtggctctgctgccggcctcagggatccccctgagttctgactgcaggcagaggatggacctgccttttcgggcaggtgacccatggcgctctcctactttgtgggaaagagggacatggagtcaggtgtgactccctggacccctcaggccaggcccccagcactgattcaccaaataactggaaactgcttcttgtcagacacaggctgtggccctggtcctgacctcagcgtgtcatcaacagaaggctgactgaggccccttggcaaggtccctggtaggtcgcgtcgccaggaggtggatgccagccccggctcaccacagccgcccctcctgtttctctccacctgcagccagtgtcctggcgtcctggaagcaacctcccctgcctgctcctcccgcttggccgcggggccacagggcgctatgactgtgcaggaggcctcagaaggacgggcaatttttaagattctatttttattattttattttatttttgagacggagtctcgctccatcacccaggctggagtgcagtggcgcgatctcggctcactgcaaccaccgcctcctgggttcaggtgattctcctgcctcagcctcctgagtagttgggattacaggcgcgtgccaccacacccggctaatatttatatttttagtagagatggggtttggccacgttggccatgttgtgcccagccaatgtcatctgtttctttttactttttaaaatatgtgggtcttgaacatttacacacgtgttggtcaacatccaggtgagaaaagacggaacacacaagctgtcagggaaatgcaaatcaaaaccatcgccaagatgatgtcactcagaaacgacaatagcggccggcacagtggctcaggcctgtgatcccagtactttgggaggctgagatgggcagatcagctgaggtcaggagttcaagaccagcctgaccaacaaggttaaactccgtcactactaaaaaatacaaaaattacatggggatggaggcactctcctgtaatcccagctactcaggaggccgaggtgggaggattgcgttagcccaggaagtcgagggtgcagtgagccgagatcaggccactgaacttaagcttgggtaacagagcaagaccctgtctcaaaaaaaataaaataaagctgggtgctgtggctcacacctgtaatctcagcattttgggaagctgagaccagtggatcacttgagatcaggagttcaagagcagcctggccaacatggtgaaaccccgtctctactaaaaatacaaaaattagggaggtcgagatgagcagatcacctgagatcaggagttcgagaccagcctttcacatggtgaaacgctgtctctactaaaaattcaaaaattagctggacgtggtggcgggcacctgtaatcccagttactcgggaggctgaggcaagagaattgcttgaacccgggaggtggaggttgcagtgagccaagatcgcaccattgcactacagcctgggtgacaagagtgaaacttcgtctcaaaaaataaataggccaggcgcggtgactcacgcctgtaatcccagctactcgggaggctgagggaggagaatggcgtgaacccgggagacggagcttgcagtgagccgagatcgcgccactgcactccggcctgggcgaaagagcgagactccgtctcaaaaaaataaaaaataaaaacaaataaatacaaaaattagctgggtgtggcggtgcacacctgtaatcctagctactcaggaggctgagacagttgaatcacttgaacccaggaggcagaggttgcagtgagctgagattgcacctctgcgctccagcccaggcgacagagtgagtctccgtctccaaaacaaattagctgggtgtctccgtgcagctactggggaagctgaagcacaagactgcctgaacccggagagagattgcagtgagctgagatcgtgccactccactccagcctgggccacagagtgaggctgcgtgtgtatttctataatgaagaaaactattgcggaaaaaaaagtcaaagagaaatgcagacctttaaaaggtctctcctgagagaagcaggaatgaggaactcgtagggtcctgggctggccgcagacaggagaccccaaggtcccagcaggagggcggtacatggtgaagatgggatccttgggggaagcctgagacactctgtggtcggctgaatcacagcccccaaagatgcccatgtcattcccgcgatctgtgaatgtaccacttcccatggccaaaggggccacccccattcttctaggctagcctcggcaggggtgccgggcctccagcctatccatgccctgagggctgccactgggacactccagacttgggacgtagagggtgccagatgggtgggttggtggggtcacctcccctgctgtctacaccgtgggtccttcaatctcgtttcctgcccctcacttgtgattcattgatcagggctacagtggagagtgaggcctgcctggggtgaggggttgtggctgtggccgctgggggtcagattctgaccacctgcctctgtgctttcactcagttgcacagcgcccgggacctggaggacctgggggaccaaccctcccaccccctccagtaggggtccttggaaggaatgtttcctggccacagaggaagaggtgttggtgcagggccaaggcctgcggttcagtcctggtcatccaggcctggtcaccttctggggtcccccaaccccccccagctcctctgtgacctgcagagagaccggtcgttgcatagggtgctagtgcaaaacgtgggcgctgcataaatgcaggggcgcccgccaggggaggagtagccgtgaatgcatcgcgcccacaactccgcaactccagctctgtgcacctgcggaaactgaagctcgggagaccgagaccggacccagagtcacacaaacgggcaaaacaggaggacgtggggctgggcccggcccgctgacctccaactccgagtctgcgccctcccttacctctgcccccagccaggcccactgacccccaaccctgagccctaggcctccgcccagaacacagcggcgagcgaagtgtggagtaatgcgcacggtccctttaagaggcacaaggccctgatcgcgcggccccgacaacaacaattccattggctggagcgtgatctctggccacgcccccacactaaatatttggagtcctactggtccagagcccgggccccgcctccctcgccctctgagcccgggcgccgcgccaggttcgctgacgcaaacgcgttgccccggcaacctctccccgtccccggggcaaaggggccccggcactggagccagtgcgcaggcgcgcggccgccgccggggagggggttcccagggcgcgcggcccggacccccgagtccgtgctctccgaccctcctgtcaccccgggacaccgtgtggggggcgcccagagccccggccgccgggaggaggaggaggcggcgcccggggactggcctagcgcgggtgcggtcggcgggcggggcgggagggcccgacccgtggctctgcggatttcaaaggcgcggggtcacacgcccagcagccgatcagccccggcatttggcgacgcagcaaatccagccctgcggggagggggccctgtccctgggccggccccatgcccaggctgcagggcctcgcccgcccccagccgcatctccctgcccctggcgcctcccaggacctgtgacagtccggggggcttgaccggggctgccctggcttcagccttctc

SEQ ID NO: 2589 - DNA, 3371 bp, Homo sapiens
cgaggcggtgcggcggctgaggcggccgaggcggccagttgggtaccgggaggggcgaaggcgggcggcagaggcgatcagaagtttccaagggtcacttgtgtctcgtccgtgggaagaccgggggagcccagaaggccttggtgtggaattctgagagctgattcctgccttgtcttctccactgttcctggaggaatccgagaagagcagagcggagggagccccagacacggtccgcgggagagctgtggggcttggtgagtgtttcgtggcctctcgggttggtcagcacccccagccagctggcccaggacccctctacagaagtccaggagagcaggcgtcaccaagatgtccaaccccttcctgaagcaagtcttcaacaaggacaagacattccgccccaagcgcaagtttgagccaggcacccagcgcttcgagctgcacaagaaggcgcaggcgtcgctgaacgccgggctggacctgcggctggccgtgcagttgcccccgggcgaggacctgaacgactgggtggctgttcacgtggtggacttctttaaccgcgtcaacctcatctacggcaccatcagcgacggctgcacggagcagtcctgccccgtcatgtcggggggccccaagtatgagtaccgctggcaggatgagcataagttccggaagcccacggcactctccgcgcccaggtacatggacctgctgatggactggatcgaggcgcagatcaacaacgaggacctcttccccaccaacgttggcactccgtttcccaagaacttcctgcagacggtgcggaagatcctgtcgcggctgttccgcgtgttcgtgcacgtctacatccaccactttgaccgcatcgcgcagatgggctccgaggcccacgtgaacacctgctacaagcacttctactatttcgtcaaggagttcggcctcatcgacaccaaggagctggagccactgaaagaaatgaccgcccggatgtgccactgagagccccgcgggtctcccggtgcccgaaccgccgctggggcctcggagacttggaggaggacgctctggaaccatcatcccgcttctctccggcctgagcatctcagggagaccaggggccgagccgctgagcaggtgttggtcctcaggagctccaaccccggacggcagatgccttcctcagtctcgagcctcagtctcccgtctgggactaaaacgtgaactctgtaattctatgtgttactagcaaccggaaaagcccactgtgtttttaaaccacttccactttccaggaggctggatggcttccagggtcactccttgccctgggtggctcccaggctcctggaacttctgcctccacctcgctggggagcccccagggctgctgtggccacagccctgcctgggcctgtctctcaagggcacccagcttgctcggcctcctacatgtctcccgttggggaggcaagaggctgaggggcttccgagcccctgagagcggacatctcctcccgcaggcctttactccgcactccccactggcagccgctggtgtctcttcacacagaggcacaacctggacccaggcagcctctttcctccctccccaatctcttccatttttctacagatttttttttttttggtcatactagagacaggggtctcgctgaactcctggcctccagtgatcctccatcctcggcctcccaaagtgctggaatcacaggggtgagccaccgcacccagccctctctcttcctcaatgcactctgcttcttccgttcttccgaaacattcagctgactgtatccagggcttcctggactcctgggaccccacgtcctgcaccccggcttctgactcatttcctaagggcccctttgtgtatcataaagggtttgatttttatagtcacatttacaaccatcttgagatttttattttttttgaacggagtctcccactgtcgcccagactggagtccagtggcacaatctcggctcactgcatcctccacctcctgggttcaagtgattctcctgcttcagcctcccaagtagctgggattacaggtgtgcgccaccacgcccaggaaattattgtagttttagtagagacaagatttcaccatgttggccaggctggtctcaaactcctgacttcaggtgatccgcctaccttggcctccaaaagtgctgggattacaggcatgagctactgcacccggcctaaccaggctggagtgcagtggtgggatctcggctcactgcaagctccgcctcccagattcacgccattctcctgcctcagcctccccagcagctgggactacaggcacccaccgtcacacccggctaatttttttgtattttagtagagacagggtttcaccgtgttagccaggatggtcttgatctcctgaccttgtgatccaccagcctcagcctcccaaagtgctgggattacaggcgtgagccactgtgcccggccaagaatttttttatcgataacatagtgagctctctgcctcttcggaacgatgtccactttgcttatgatcaacccaagcaggactcttctctccctggacgcctctcccctggtctggaatcttccagttctgccagaattggcctttcccagatgctgcaaacttccagttgaacccctttttctgtgtggcccctggggctgcgagaccaaaatccatgagttctgtgtaccctagacctttggaaggtgagagcagggccctgagaaaaggcagccacctcctctccctggctgaacccctgccaccctactcctcaccagaattgtcagtggcctttcaccacagtggtccttcctgcctgagccctgcactgtcccagaccacacagaagtctggtcacctctgggcgcctgggatggtcaccgaagagaagcacgctgtccccgtctctcctggcttctgccagaaaatcgaacaagtgcaattaacacactgttactgccgaagcctgaaactcccaggacttgtccttgatccttccagaaaccaccaggtccggcacttggagccccccggagagggacctcccagccgagccctcaaagaactccatgaaatcaggaactgcttgatgaaatgtatctccttgtacctggaagatgaagcccaaacacccacacctctgtctcccccagggctcgggatgtctccagcagcccggccacgcagcttcccaggtgggctcggggaggtgggagcagggaccatctctgtcccctccaccctcactccatccacctcggagaccaccctcccccagccagatacggaataaaactacagacgcagacgtcggaataaa

SEQ ID NO: 2590 - protein, 206 aa, Homo sapiens
MSSVYPRPLEGESRALRKGSHLLSLAEPLPPYSSPELSVAFHHSGPSCLSPALSQTTQKSGHLWAPGMVTEEKHAVPVSPGFCQKIEQVQLTHCYCRSLKLPGLVLDPSRNHQVRHLEPPGEGPPSRALKELHEIRNCLMKCISLYLEDEAQTPTPLSPPGLGMSPAARPRSFPGGLGEVGAGTISVPSTLTPSTSETTLPQPDTE

SEQ ID NO: 2591 - DNA, 4781 bp, Homo sapiens
ttgcaaggggcccggagcgggatcgcggcacctgccgagcgggtcgccgcctctgccgcggtccttggaccccgccgccgccctggcctgggagcttgccccgccgcagcggccggcagcgcggcgctccgcgggcggcaggcacgggccccgggccccctcacggcgcccagccgcgggcctcccgaggcaaaagcccgtgggccgccgcgatggccctcaagatggtgaagggcagcatcgaccgcatgttcgacaagaatctgcaggacttggtccgcggcatccgtaaccacaaggaggacgaggcaaaatacatatctcagtgcattgatgagatcaagcaggagctgaagcaggacaacatagcggtgaaggcgaacgcggtctgcaagctgacgtatttacagatgttgggatacgacatcagctgggccgccttcaacatcatagaagtgatgagtgcctccaagttcaccttcaagcgaattggctacctcgctgcttcccagagctttcacgaaggcaccgacgtcatcatgctgaccaccaatcagatccgtaaggacttgagcagccccagccagtacgacacaggtgttgcactgacgggtctgtcctgcttcgtcaccccagaccttgccagagacctggcaaatgacatcatgacactgatgtcacacaccaagccctacatcaggaagaaggctgtgctgatcatgtacaaggtgttcctgaagtaccccgagtcgctgcgccctgcctttccccggctgaaggagaagctggaggaccccgaccccggggttcagtcggctgccgtcaatgtcatctgcgagctggccagacgcaaccctaagaactacctgtccctggccccgctctttttcaagctgatgacgtcctccaccaacaactgggtcctcatcaagatcatcaagctggcaattcggtgctcttactcctttggaaccgcggctgggcaagaagctgatcgagcccctcaccaatctcatccacagcacgtctgccatgtctctcctctatgaatgtgtgaacaccgtgattgcagtgctcatctcgctgtcctccggcatgcccaaccacagcgccagcatccagctttgtgttcagaaattaaggatattgatcgaggactccgatcagaacttgaagtacctggggctgctggcaatgtccaagatcctgaagacccaccccaagtccgtgcagtcccacaaggacctcatcctgcagtgcctggacgacaaggacgagtccatccggctgcgggccctggacctgctctatgggatggtgtccaagaagaacctgatggagatcgtgaagaagctgatgacccacgtagacaaggcagagggtaccacctaccgtgacgagctgctcaccaagatcattgacatctgcagccagtccaactaccagtacatcaccaacttcgagtggtacatcagcatcctggtggagctgacccggctggagggcacacggcacggccacctcatcgccgcccaaatgctggacgtggccatccgcgtgaaggccatccgcaagttcgccgtgtcccagatgtctgcgctgcttgacagtgcacacctgctggccagcagcacccagcggaacgggatctgtgaggtgctgtacgctgccgcctggatctgcggggagttctcagagcatctgcaggaaccacaccacactttggaggccatgctgcggcccagagtcaccacgctgccaggccacatccaggccgtgtatgtgcagaacgtggtcaagctctacgcctccatcctgcagcagaaggagcaggccggggaggcagagggcgctcaggccgtcacccagctcatggtggaccggctgccccagtttgtgcagagcgcagacctggaggtgcaggagcgggcgtcctgcatcctgcagctggtcaagcacatccagaagcttcaggccaaggacgtgcctgtggcagaggaggtcagcgctctctttgctggggagctgaacccagtggcccccaaggcccagaagaaggttccagtccccgaaggcctggacctggacgcctggatcaatgagccactctcggacagcgagtcagaggacgagaggcccagggccgtcttccacgaggaggagcagcggcgtcccaagcaccggccgtcggaggcggacgaggaagagctggctcggcgccgagaggcccggaagcaggagcaggccaacaaccccttctacatcaagagctcgccatcgccacagaagcggtaccaggacaccccgggcgtggagcacattcccgtggtgcagattgacctctccgtccccttgaaggttccaggcaagtggctgcctatgtcagatcagtatgtgaagctggaggaggagcggcggcaccggcagaagctggagaaggacaagaggaggaaaaagaggaaggagaaggagaagaagggcaagcgccgccacagctcgctgcccacggagagcgacgaggacatcgcccctgcccagcaggtggacatcgtcacagaggagatgcctgagaatgctctgcccagcgacgaggatgacaaagaccccaacgacccctacagggctctggatattgacctggataagcccttagccgacagcgagaaactgcctattcagaaacacagaaacaccgagacctcaaaatcccctgagaaggacgttcccatggtagaaaagaagagcaagaaacccaagaagaaagagaaaaaacacaaagagaaagagagagacaaggagaagaagaaggagaaggagaagaagaaatctcccaagcctaagaagaagaagcacaggaaggagaaggaggagcggaccaaaggcaagaagaagtccaagaagcagcctccaggcagcgaggaggcagcgggggagccggtgcagaatggcgcgccagaggaggagcagctcccgcctgagtccagctactccctcctcgctgaaaattcctatgttaaaatgacctgtgacatccggggcagtctgcaggaggacagccaggtcactgtggccatcgtgctggagaacaggagcagcagcatcctcaagggcatggagctcagcgtgctggactcactcaatgccaggatggcccggccgcagggctcctccgtccacgatggcgtccccgtgcctttccagctgcccccaggcgtctccaacgaagcccagtatgtgttcaccatccagagcatcgtcatggcgcagaagctcaaggggaccctgtccttcattgccaagaatgacgagggtgcgacccacgagaagctggacttcaggctgcacttcagctgcagctcctacttgatcaccactccctgctacagtgacgcctttgctaagttgctggagtctggggacttgagcatgagctcaatcaaagtcgatggcattcggatgtccttccagaatcttctggcgaagatctgttttcaccaccatttttccgttgtggagcgagtggactcctgcgcctccatgtacagccgctccatccagggccaccatgtctgcctcctggtgaaaaagggtgagaactctgtctcagtcgacgggaagtgcagtgactccacgctactgagcaacttgttagaagagatgaaggcgacgctggccaagtgttgagagctgcctgcgagccccgcaccaccccgcggacctctcctcagtcgtgtgtactgtacccaagcctgagtgttaatttaactctatgttgtccgccgtgtagacatccgaggtcatttgttgcgttgaattatctgaccatccttttttactgtgactcttcccattctctttggcaagaagtccccttctcgcccccaaaccagcaagggactcccccacctgggtctgtgccctgccccgcgctgggggccgagtccttgaatgtggcttcaggggctcctgtcctgggccagggcctgatgggcaccacgtgaggggcacttggtggacagggcggggctgacgtggcctcctctggggtcgcctgcttttgacccaaaggtcctgacggttgcgtccgggggaggggaaggaagggccgctgtcgccaaggttttctctcccagaacccacagtgggaaagcggtcttgccaggcgttgtccattgtcagtgtgctcgtgggctggtgactgggtcttgggatcccaggccacgcgccagccaggctgtgggcagggcgggggggttgaggcctctctgccacccgtcttcctggtcagcagaagtgcatctcggcttgggtttggggtggtccgcatcccctgcttgccactatgcgcaccaaggtttccccacatccttcccagcacccttaggaaggcccaggcagggcctggaagcagcggacctgggctgttctgtgttgaaggagtgtgcccagtgcccttgggcaggacctgtgagagccacctcacaggcagagcccccaccaggcagggcaaggagactccgctcactccccacggccagcgtgggcacaggactgacccttcttcagagataatgacattttatcttctccttttgatgaaaactgtcactttagcatgtaatccattacagaatcccatgcagtgattccaggatttgaaattgtatgatgtgttacataagaatttatttgctatcgacattcccgtataaagagagagacatatcacgctgctgtcatgattttgtgtcaagatgatccaataaagttgtaaaacaggc

SEQ ID NO: 2592 - protein, 879 aa, Homo sapiens
MSLLYECVNTVIAVLISLSSGMPNHSASIQLCVQKLRILIEDSDQNLKYLGLLAMSKILKTHPKSVQSHKDLILQCLDDKDESIRLRALDLLYGMVSKKNLMEIVKKLMTHVDKAEGTYDELLTKIIDICSQSNYQYITNFEWYISILVELTRLEGTRHGHLIAAQMLDVAIRVKAIRKFAVSQMSALLDSAHLLASSTQRNGICEVLYAAAWICGEFSEHLQEPHHTLEAMLRPRVTTLPGHIQAVYVQNVVKLYASILQQKEQAGEAEGAQAVTQLMVDRLPQFVQSADLEVQERASCILQLVKHIQKLQAKDVPVAEEVSALFAGELNPVAPKAQKKVPVPEGLDLDAWINEPLSDSESEDERPRAVFHEEEQRRPKHRPSEADEEELARRREARKQEQANNPFYIKSSPSPQKRYQDTPGVEHIPVVQIDLSVPLKVPGKWLPMSDQYVKLEEERRHRQKLEKDKRRKKRKEKEKKGKRRHSSLPTESDEDIAPAQQVDIVTEEMPENALPSDEDDKDPNDPYRALDIDLDKPLADSEKLPIQKHRNTETSKSPEKDVPMVEKKSKKPKKKEKKHKEKERDKEKKKEKEKKKSPKPKKKKHRKEKEERTKGKKKSKKQPPGSEEAAGEPVQNGAPEEEQLPPESSYSLLAENSYVKMTCDIRGSLQEDSQVTVAIVLENRSSSILKGMELSVLDSLNARMARPQGSSVHDGVPVPFQLPPGVSNEAQYVFTIQSIVMAQKLKGTLSFIAKNDEGATHEKLDFRLHFSCSSYLITTPCDAFAKLLESGDLSMSSIKVDGIRMSFQNLLAKICFHHHFSVVERVDSCASMYSRSIQGHHVCLLVKKGENSVSVDGKCSDSTLLSNLLEEMKATLAKC

SEQ ID NO: 2593 - DNA, 995 bp, Homo sapiens
cgcggcacctgccgagcgggtcgccgcctctgccgcggtccttggaccccgccgccgccctggcctgggagcttgccccgccgcagcggccggcagcgcggcgctccgcgggcggcaggcacgggccccgggccccctcacggcgcccagccgcgggcctcccgaggcaaaagcccgtgggccgccgcgatggccctcaagatggtgaagggcagcatcgaccgcatgttcgacaagaatctgcaggacttggtccgcggcatccgtaaccacaaggaggacgaggtccgcgggagagctgtggggcttggtgagtgtttcgtggcctctcgggttggtcagcacccccagccagctggcccaggacccctctacagaagtccaggagagcaggcgtcaccaagatgtccaaccccttcctgaagcaagtcttcaacaaggacaagacattccgccccaagcgcaagtttgagccaggcacccagcgcttcgagctgcacaagaaggcgcaggcgtcgctgaacgccgggctggacctgcggctggccgtgcagttgcccccgggcgaggacctgaacgactgggtggctgttcacgtggtggacttctttaaccgcgtcaacctcatctacggcaccatcagcgacggctgcacggagcagtcctgccccgtcatgtcggggggccccaagtatgagtaccgctggcaggatgagcataagttccggaagcccacggcactctccgcgcccaggtacatggacctgctgatggactggatcgaggcgcagatcaacaacgaggacctcttccccaccaacgttgcagagaatgacaggatcagcatcaggcctggagtccttcgcagaggagacaagcacccctgccagtgctgggcccagtgttctcagtggtttcagaatcactgccatggagcccctgggcccaccaggatcatcaccccgttggcgggaccccctgcccagctcgatgtg

SEQ ID NO: 2594 - protein, 197 aa, Homo sapiens
MSNPFLKQVFNKDKTFRPKRKFEPGTQRFELHKKAQASLNAGLDLRLAVQLPPGEDLNDWVAVHVVDFFNRVNLIYGTISDGCTEQSCPVMSGGPKYEYRWQDEHKFRKPTALSAPRYMDLLMDWIEAQINNEDLFPTNVAENDRISIRPGVLRRGDKHPCQCWAQCSQWFQNHCHGAPGPTRIITPLAGPPAQLDV

SEQ ID NO: 2595 - DNA, 4654 bp, Homo sapiens
ttgcaaggggcccggagcgggatcgcggcacctgccgagcgggtcgccgcctctgccgcggtccttggaccccgccgccgccctggcctgggagcttgccccgccgcagcggccggcagcgcggcgctccgcgggcggcaggcacgggccccgggccccctcacggcgcccagccgcgggcctcccgaggcaaaagcccgtgggccgccgcgatggccctcaagatggtgaagggcagcatcgaccgcatgttcgacaagaatctgcaggacttggtccgcggcatccgtaaccacaaggaggacgaggcaaaatacatatctcagtgcattgatgagatcaagcaggagctgaagcaggacaacatagcggtgaaggcgaacgcggtctgcaagctgacgtatttacagatgttgggatacgacatcagctgggccgccttcaacatcatagaagtgatgagtgcctccaagttcaccttcaagcgaattggctacctcgctgcttcccagagctttcacgaaggcaccgacgtcatcatgctgaccaccaatcagatccgtaaggacttgagcagccccagccagtacgacacaggtgttgcactgacgggtctgtcctgcttcgtcaccccagaccttgccagagacctggcaaatgacatcatgacactgatgtcacacaccaagccctacatcaggaagaaggctaagctgatcgagcccctcaccaatctcatccacagcacgtctgccatgtctctcctctatgaatgtgtgaacaccgtgattgcagtgctcatctcgctgtcctccggcatgcccaaccacagcgccagcatccagctttgtgttcagaaattaaggatattgatcgaggactccgatcagaacttgaagtacctggggctgctggcaatgtccaagatcctgaagacccaccccaagtccgtgcagtcccacaaggacctcatcctgcagtgcctggacgacaaggacgagtccatccggctgcgggccctggacctgctctatgggatggtgtccaagaagaacctgatggagatcgtgaagaagctgatgacccacgtagacaaggcagagggtaccacctaccgtgacgagctgctcaccaagatcattgacatctgcagccagtccaactaccagtacatcaccaacttcgagtggtacatcagcatcctggtggagctgacccggctggagggcacacggcacggccacctcatcgccgcccaaatgctggacgtggccatccgcgtgaaggccatccgcaagttcgccgtgtcccagatgtctgcgctgcttgacagtgcacacctgctggccagcagcacccagcggaacgggatctgtgaggtgctgtacgctgccgcctggatctgcggggagttctcagagcatctgcaggaaccacaccacactttggaggccatgctgcggcccagagtcaccacgctgccaggccacatccaggccgtgtatgtgcagaacgtggtcaagctctacgcctccatcctgcagcagaaggagcaggccggggaggcagagggcgctcaggccgtcacccagctcatggtggaccggctgccccagtttgtgcagagcgcagacctggaggtgcaggagcgggcgtcctgcatcctgcagctggtcaagcacatccagaagcttcaggccaaggacgtgcctgtggcagaggaggtcagcgctctctttgctggggagctgaacccagtggcccccaaggcccagaagaaggttccagtccccgaaggcctggacctggacgcctggatcaatgagccactctcggacagcgagtcagaggacgagaggcccagggccgtcttccacgaggaggagcagcggcgtcccaagcaccggccgtcggaggcggacgaggaagagctggctcggcgccgagaggcccggaagcaggagcaggccaacaaccccttctacatcaagagctcgccatcgccacagaagcggtaccaggacaccccgggcgtggagcacattcccgtggtgcagattgacctctccgtccccttgaaggttccaggcaagtggctgcctatgtcagatcagtatgtgaagctggaggaggagcggcggcaccggcagaagctggagaaggacaagaggaggaaaaagaggaaggagaaggagaagaagggcaagcgccgccacagctcgctgcccacggagagcgacgaggacatcgcccctgcccagcaggtggacatcgtcacagaggagatgcctgagaatgctctgcccagcgacgaggatgacaaagaccccaacgacccctacagggctctggatattgacctggataagcccttagccgacagcgagaaactgcctattcagaaacacagaaacaccgagacctcaaaatcccctgagaaggacgttcccatggtagaaaagaagagcaagaaacccaagaagaaagagaaaaaacacaaagagaaagagagagacaaggagaagaagaaggagaaggagaagaaggctgaggacctggacttctggctgtctaccaccccaccgcctgcccccgcccccgcccccgcccccgttccatccacggacgagtgtgaggacgccaagacggaggcgcagggcgaggaggacgatgccgaggggcaagaccaggacaagaaatctcccaagcctaagaagaagaagcacaggaaggagaaggaggagcggaccaaaggcaagaagaagtccaagaagcagcctccaggcagcgaggaggcagcgggggagccggtgcagaatggcgcgccagaggaggagcagctcccgcctgagtccagctactccctcctcgctgaaaattcctatgttaaaatgacctgtgacatccggggcagtctgcaggaggacagccaggtcactgtggccatcgtgctggagaacaggagcagcagcatcctcaagggcatggagctcagcgtgctggactcactcaatgccaggatggcccggccgcagggctcctccgtccacgatggcgtccccgtgcctttccagctgcccccaggcgtctccaacgaagcccagtatgtgttcaccatccagagcatcgtcatggcgcagaagctcaaggggaccctgtccttcattgccaagaatgacgagggtgcgacccacgagaagctggacttcaggctgcacttcagctgcagctcctacttgatcaccactccctgctacagtgacgcctttgctaagttgctggagtctggggacttgagcatgagctcaatcaaagtcgatggcattcggatgtccttccagaatcttctggcgaagatctgttttcaccaccatttttccgttgtggagcgagtggactcctgcgcctccatgtacagccgctccatccagggccaccatgtctgcctcctggtgaaaaagggtgagaactctgtctcagtcgacgggaagtgcagtgactccacgctactgagcaacttgttagaagagatgaaggcgacgctggccaagtgttgagagctgcctgcgagccccgcaccaccccgcggacctctcctcagtcgtgtgtactgtacccaagcctgagtgttaatttaactctatgttgtccgccgtgtagacatccgaggtcatttgttgcgttgaattatctgaccatccttttttactgtgactcttcccattctctttggcaagaagtccccttctcgcccccaaaccagcaagggactcccccacctgggtctgtgccctgccccgcgctgggggccgagtccttgaatgtggcttcaggggctcctgtcctgggccagggcctgatgggcaccacgtgaggggcacttggtggacagggcggggctgacgtggcctcctctggggtcgcctgcttttgacccaaaggtcctgacggttgcgtccgggggaggggaaggaagggccgctgtcgccaaggttttctctcccagaacccacagtgggaaagcggtcttgccaggcgttgtccattgtcagtgtgctcgtgggctggtgactgggtcttgggatcccaggccacgcgccagccaggctgtgggcagggcgggggggttgaggcctctctgccacccgtcttcctggtcagcagaagtgcatctcggcttgggtttggggtggtccgcatcccctgcttgccactatgcgcaccaaggtttccccacatccttcccagcacccttaggaaggcccaggcagggcctggaagcagcggacctgggctgttctgtgttgaaggagtgtgcccagtgcccttgggcaggacctgtgagagccacctcacaggcagagcccccaccaggcagggcaaggagactccgctcactccccacggccagcgtgggcacaggactgacccttcttcagagataatgacattttatcttctccttttgatgaaaactgtcactttagcatgtaatccattacagaatcccatgcagtgattccaggatttgaaattgtatgatgtgttacataagaatttatttgctatcgacattcccgtataaagagagagacatatcacgctgctgtcatgattttgtgtcaagatgatccaataaagttgtaaaacaggc

SEQ ID NO: 2596 - protein, 1108 aa, Homo sapiens
MALKMVKGSIDRMFDKNLQDLVRGIRNHKEDEAKYISQCIDEIKQELKQDNIAVKANAVCKLTYLQMLGYDISWAAFNIIEVMSASKFTFKRIGYLAASQSFHEGTDVIMLTTNQIRKDLSSPSQYDTGVTGLSCFVTPDLARDLANDIMTLMSHTKPYIRKKAKLIEPLTNLIHSTSAMSLLYECVNTVIAVLISLSSGMPNHSASIQLCVQKLRILIEDSDQNLKYLGLLAMSKILKTHPKSVQSHKDLILQCLDDKDESIRLRALDLLYGMVSKKNLMEIVKKLMTHVDKAEGTYDELLTKIIDICSQSNYQYITNFEWYISILVELTRLEGTRHGHLIAAQMLDVAIRVKAIRKFAVSQMSALLDSAHLLASSTQRNGICEVLYAAAWICGEFSEHLQEPHHTLEAMLRPRVTTLPGHIQAVYVQNVVKLYASILQQKEQAGEAEGAQAVTQLMVDRLPQFVQSADLEVQERASCILQLVKHIQKLQAKDVPVAEEVSALFAGELNPVAPKAQKKVPVPEGLDLDAWINEPLSDSESEDERPRAVFHEEEQRRPKHRPSEADEEELARRREARKQEQANNPFYIKSSPSPQKRYQDTPGVEHIPVVQIDLSVPLKVPGKWLPMSDQYVKLEEERRHRQKLEKDKRRKKRKEKEKKGKRRHSSLPTESDEDIAPAQQVDIVTEEMPENALPSDEDDKDPNDPYRALDIDLDKPLADSEKLPIQKHRNTETSKSPEKDVPMVEKKSKKPKKKEKKHKEKERDKEKKKEKEKKAEDLDFWLSTTPPPAPAPAPAPVPSTDECEDAKTEAQGEEDDAEGQDQDKKSPKPKKKKHRKEKEERTKGKKKSKKQPPGSEEAAGEPVQNGAPEEEQLPPESSYSLLAENSYVKMTCDIRGSLQEDSQVTVAIVLENRSSSILKGMELSVLDSLNARMARPQGSSVHDGVPVPFQLPPGVSNEAQYVFTIQSIVMAQKLKGTLSFIAKNDEGATHEKLDFRLHFSCSSYLITTPCDAFAKLLESGDLSMSSIKVDGIRMSFQNLLAKICFHHHFSVVERVDSCASMYSRSIQGHHVCLLVKKGENSVSVDGKCSDSTLLSNLLEEMKATLAKC

SEQ ID NO: 2597 - DNA, 3290 bp, Homo sapiens
aagtttccaagggtcacttgtgtctcgtccgtgggaagaccgggggagcccagaaggccttggtgtggaattctgagagctgattcctgccttgtcttctccactgttcctggaggaatccgagaagagcagagcggagggagccccagacacggtccgcgggagagctgtggggcttggtgagtgtttcgtggcctctcgggttggtcagcacccccagccagctggcccaggacccctctacagaagtccaggagagcaggcgtcaccaagatgtccaaccccttcctgaagcaagtcttcaacaaggacaagacattccgccccaagcgcaagtttgagccaggcacccagcgcttcgagctgcacaagaaggcgcaggcgtcgctgaacgccgggctggacctgcggctggccgtgcagttgcccccgggcgaggacctgaacgactgggtggctgttcacgtggtggacttctttaaccgcgtcaacctcatctacggcaccatcagcgacggctgcacggagcagtcctgccccgtcatgtcggggggccccaagtatgagtaccgctggcaggatgagcataagttccggaagcccacggcactctccgcgcccaggtacatggacctgctgatggactggatcgaggcgcagatcaacaacgaggacctcttccccaccaacgttggcactccgtttcccaagaacttcctgcagacggtgcggaagatcctgtcgcggctgttccgcgtgttcgtgcacgtctacatccaccactttgaccgcatcgcgcagatgggctccgaggcccacgtgaacacctgctacaagcacttctactatttcgtcaaggagttcggcctcatcgacaccaaggagctggagccactgaaagaaatgaccgcccggatgtgccactgagagccccgcgggtctcccggtgcccgaaccgccgctggggcctcggagacttggaggaggacgctctggaaccatcatcccgcttctctccggcctgagcatctcagggagaccaggggccgagccgctgagcaggtgttggtcctcaggagctccaaccccggacggcagatgccttcctcagtctcgagcctcagtctcccgtctgggactaaaacgtgaactctgtaattctatgtgttactagcaaccggaaaagcccactgtgtttttaaaccacttccactttccaggaggctggatggcttccagggtcactccttgccctgggtggctcccaggctcctggaacttctgcctccacctcgctggggagcccccagggctgctgtggccacagccctgcctgggcctgtctctcaagggcacccagcttgctcggcctcctacatgtctcccgttggggaggcaagaggctgaggggcttccgagcccctgagagcggacatctcctcccgcaggcctttactccgcactccccactggcagccgctggtgtctcttcacacagaggcacaacctggacccaggcagcctctttcctccctccccaatctcttccatttttctacagatttttttttttttggtcatactagagacaggggtctcgctgaactcctggcctccagtgatcctccatcctcggcctcccaaagtgctggaatcacaggggtgagccaccgcacccagccctctctcttcctcaatgcactctgcttcttccgttcttccgaaacattcagctgactgtatccagggcttcctggactcctgggaccccacgtcctgcaccccggcttctgactcatttcctaagggcccctttgtgtatcataaagggtttgatttttatagtcacatttacaaccatcttgagatttttattttttttgaacggagtctcccactgtcgcccagactggagtccagtggcacaatctcggctcactgcatcctccacctcctgggttcaagtgattctcctgcttcagcctcccaagtagctgggattacaggtgtgcgccaccacgcccaggaaattattgtagttttagtagagacaagatttcaccatgttggccaggctggtctcaaactcctgacttcaggtgatccgcctaccttggcctccaaaagtgctgggattacaggcatgagctactgcacccggcctaaccaggctggagtgcagtggtgggatctcggctcactgcaagctccgcctcccagattcacgccattctcctgcctcagcctccccagcagctgggactacaggcacccaccgtcacacccggctaatttttttgtattttagtagagacagggtttcaccgtgttagccaggatggtcttgatctcctgaccttgtgatccaccagcctcagcctcccaaagtgctgggattacaggcgtgagccactgtgcccggccaagaatttttttatcgataacatagtgagctctctgcctcttcggaacgatgtccactttgcttatgatcaacccaagcaggactcttctctccctggacgcctctcccctggtctggaatcttccagttctgccagaattggcctttcccagatgctgcaaacttccagttgaacccctttttctgtgtggcccctggggctgcgagaccaaaatccatgagttctgtgtaccctagacctttggaaggtgagagcagggccctgagaaaaggcagccacctcctctccctggctgaacccctgccaccctactcctcaccagaattgtcagtggcctttcaccacagtggtccttcctgcctgagccctgcactgtcccagaccacacagaagtctggtcacctctgggcgcctgggatggtcaccgaagagaagcacgctgtccccgtctctcctggcttctgccagaaaatcgaacaagtgcaattaacacactgttactgccgaagcctgaaactcccaggacttgtccttgatccttccagaaaccaccaggtccggcacttggagccccccggagagggacctcccagccgagccctcaaagaactccatgaaatcaggaactgcttgatgaaatgtatctccttgtacctggaagatgaagcccaaacacccacacctctgtctcccccagggctcgggatgtctccagcagcccggccacgcagcttcccaggtgggctcggggaggtgggagcagggaccatctctgtcccctccaccctcactccatccacctcggagaccaccctcccccagccagatacggaataaaactacagacgcagacgtcggaataaa

SEQ ID NO: 2598 - protein, 206 aa, Homo sapiens; identical to SEQ ID NO: 2590

SEQ ID NO: 2599 - DNA, 2982 bp, Homo sapiens
tgggattacaggcgtgagccaccgcgcccagcgccttttttagcaggacagattctgggctgggagcatcttccagccaagtatgagggctgggctgccaggccgggagccagtgttgtgcactgacctagaacatatggaactgacttctccactcagggcttgtctctcaggcgcctcccgtgctctggggcagcggtccccgaggcagtggcaggatgtggaaacctccggaaggaagtgggtgactgtggtccgtgagctgctacacctcggtgggggaggggtcataccagttggttgcttagagaaactgtgttgttcaaaaaaaaaaaaaaaaaaagtgttgcagcaggggaatttgtcatttcacctttcatttctctagaagtttccaagggtcacttgtgtctcgtccgtgggaagaccgggggagcccagaaggccttggtgtggaattctgagagctgattcctgccttgtcttctccactgttcctggaggaatccgagaagagcagagcggagggagccccagacacggtccgcgggagagctgtggggcttggtgagtgtttcgtggcctctcgggttggtcagcacccccagccagctggcccaggacccctctacagaagtccaggagagcaggcgtcaccaagatgtccaaccccttcctgaagcaagtcttcaacaaggacaagacattccgccccaagcgcaagtttgagccaggcacccagcgcttcgagctgcacaagaaggcgcaggcgtcgctgaacgccgggctggacctgcggctggccgtgcagttgcccccgggcgaggacctgaacgactgggtggctgttcacgtggtggacttctttaaccgcgtcaacctcatctacggcaccatcagcgacggctgcacggagcagtcctgccccgtcatgtcggggggccccaagtatgagtaccgctggcaggatgagcataagttccggaagcccacggcactctccgcgcccaggtacatggacctgctgatggactggatcgaggcgcagatcaacaacgaggacctcttccccaccaacgttggcactccgtttcccaagaacttcctgcagacggtgcggaagatcctgtcgcggctgttccgcgtgttcgtgcacgtctacatccaccactttgaccgcatcgcgcagatgggctccgaggcccacgtgaacacctgctacaagcacttctactatttcgtcaaggagttcggcctcatcgacaccaaggagctggagccactgaaagaaatgaccgcccggatgtgccactgagagccccgcgggtctcccggtgcccgaaccgccgctggggcctcggagacttggaggaggacgctctggaaccatcatcccgcttctctccggcctgagcatctcagggagaccaggggccgagccgctgagcaggtgttggtcctcaggagctccaaccccggacggcagatgccttcctcagtctcgagcctcagtctcccgtctgggactaaaacgtgaactctgtaattctatgtgttactagcaaccggaaaagcccactgtgtttttaaaccacttccactttccaggaggctggatggcttccagggtcactccttgccctgggtggctcccaggctcctggaacttctgcctccacctcgctggggagcccccagggctgctgtggccacagccctgcctgggcctgtctctcaagggcacccagcttgctcggcctcctacatgtctcccgttggggaggcaagaggctgaggggcttccgagcccctgagagcggacatctcctcccgcaggcctttactccgcactccccactggcagccgctggtgtctcttcacacagaggcacaacctggacccaggcagcctctttcctccctccccaatctcttccatttttctacagatttttttttttttggtcatactagagacaggcccggctaatttttttgtattttagtagagacagggtttcaccgtgttagccaggatggtcttgatctcctgaccttgtgatccaccagcctcagcctcccaaagtgctgggattacaggcgtgagccactgtgcccggccaagaatttttttatcgataacatagtgagctctctgcctcttcggaacgatgtccactttgcttatgatcaacccaagcaggactcttctctccctggacgcctctcccctggtctggaatcttccagttctgccagaattggcctttcccagatgctgcaaacttccagttgaacccctttttctgtgtggcccctggggctgcgagaccaaaatccatgagttctgtgtaccctagacctttggaaggtgagagcagggccctgagaaaaggcagccacctcctctccctggctgaacccctgccaccctactcctcaccagaattgtcagtggcctttcaccacagtggtccttcctgcctgagccctgcactgtcccagaccacacagaagtctggtcacctctgggcgcctgggatggtcaccgaagagaagcacgctgtccccgtctctcctggcttctgccagaaaatcgaacaagtgcaattaacacactgttactgccgaagcctgaaactcccaggacttgtccttgatccttccagaaaccaccaggtccggcacttggagccccccggagagggacctcccagccgagccctcaaagaactccatgaaatcaggaactgcttgatgaaatgtatctccttgtacctggaagatgaagcccaaacacccacacctctgtctcccccagggctcgggatgtctccagcagcccggccacgcagcttcccaggtgggctcggggaggtgggagcagggaccatctctgtcccctccaccctcactccatccacctcggagaccaccctcccccagccagatacggaataaaactacagacgcagacgtcgg

SEQ ID NO: 2600 - protein, 206 aa, Homo sapiens; identical to SEQ ID NO: 2590

SEQ ID NO: 2601 - DNA, 4730 bp, Homo sapiens
ttgcaaggggcccggagcgggatcgcggcacctgccgagcgggtcgccgcctctgccgcggtccttggaccccgccgccgccctggcctgggagcttgccccgccgcagcggccggcagcgcggcgctccgcgggcggcaggcacgggccccgggccccctcacggcgcccagccgcgggcctcccgaggcaaaagcccgtgggccgccgcgatggccctcaagatggtgaagggcagcatcgaccgcatgttcgacaagaatctgcaggacttggtccgcggcatccgtaaccacaaggaggacgaggcaaaatacatatctcagtgcattgatgagatcaagcaggagctgaagcaggacaacatagcggtgaaggcgaacgcggtctgcaagctgacgtatttacagatgttgggatacgacatcagctgggccgccttcaacatcatagaagtgatgagtgcctccaagttcaccttcaagcgaattggctacctcgctgcttcccagagctttcacgaaggcaccgacgtcatcatgctgaccaccaatcagatccgtaaggacttgagcagccccagccagtacgacacaggtgttgcactgacgggtctgtcctgcttcgtcaccccagaccttgccagagacctggcaaatgacatcatgacactgatgtcacacaccaagccctacatcaggaagaaggctaagctgatcgagcccctcaccaatctcatccacagcacgtctgccatgtctctcctctatgaatgtgtgaacaccgtgattgcagtgctcatctcgctgtcctccggcatgcccaaccacagcgccagcatccagctttgtgttcagaaattaaggatattgatcgaggactccgatcagaacttgaagtacctggggctgctggcaatgtccaagatcctgaagacccaccccaagtccgtgcagtcccacaaggacctcatcctgcagtgcctggacgacaaggacgagtccatccggctgcgggccctggacctgctctatgggatggtgtccaagaagaacctgatggagatcgtgaagaagctgatgacccacgtagacaaggcagagggtaccacctaccgtgacgagctgctcaccaagatcattgacatctgcagccagtccaactaccagtacatcaccaacttcgagtggtacatcagcatcctggtggagctgacccggctggagggcacacggcacggccacctcatcgccgcccaaatgctggacgtggccatccgcgtgaaggccatccgcaagttcgccgtgtcccagatgtctgcgctgcttgacagtgcacacctgctggccagcagcacccagcggaacgggatctgtgaggtgctgtacgctgccgcctggatctgcggggagttctcagagcatctgcaggaaccacaccacactttggaggccatgctgcggcccagagtcaccacgctgccaggccacatccaggccgtgtatgtgcagaacgtggtcaagctctacgcctccatcctgcagcagaaggagcaggccggggaggcagagggcgctcaggccgtcacccagctcatggtggaccggctgccccagtttgtgcagagcgcagacctggaggtgcaggagcgggcgtcctgcatcctgcagctggtcaagcacatccagaagcttcaggccaaggacgtgcctgtggcagaggaggtcagcgctctctttgctggggagctgaacccagtggcccccaaggcccagaagaaggttccagtccccgaaggcctggacctggacgcctggatcaatgagccactctcggacagcgagtcagaggacgagaggcccagggccgtcttccacgaggaggagcagcggcgtcccaagcaccggccgtcggaggcggacgaggaagagctggctcggcgccgagaggcccggaagcaggagcaggccaacaaccccttctacatcaagagctcgccatcgccacagaagcggtaccaggacaccccgggcgtggagcacattcccgtggtgcagattgacctctccgtccccttgaaggttccagggctgcctatgtcagatcagtatgtgaagctggaggaggagcggcggcaccggcagaagctggagaaggacaagaggaggaaaaagaggaaggagaaggagaagaagggcaagcgccgccacagctcgctgcccacggagagcgacgaggacatcgcccctgcccagcaggtggacatcgtcacagaggagatgcctgagaatgctctgcccagcgacgaggatgacaaagaccccaacgacccctacagggctctggatattgacctggataagcccttagccgacagcgagaaactgcctattcagaaacacagaaacaccgagacctcaaaatcccctgagaaggacgttcccatggtagaaaagaagagcaagaaacccaagaagaaagagaaaaaacacaaagagaaagagagagacaaggagaagaagaaggagaaggagaagaaggctgaggacctggacttctggctgtctaccaccccaccgcctgcccccgcccccgcccccgcccccgttccatccacggacgagtgtgaggacgccaagacggaggcgcagggcgaggaggacgatgccgaggggcaagaccaggacaagaaatctcccaagcctaagaagaagaagcacaggaaggagaaggaggagcggaccaaaggcaagaagaagtccaagaagcagcctccaggcagcgaggaggcagcgggggagccggtgcagaatggcgcgccagaggaggagcagctcccgcctgagtccagctactccctcctcgctgaaaattcctatgttaaaatgacctgtgacatccggggcagtctgcaggaggacagccaggtcactgtggccatcgtgctggagaacaggagcagcagcatcctcaagggcatggagctcagcgtgctggactcactcaatgccaggatggcccggccgcagggctcctccgtccacgatggcgtccccgtgcctttccagctgcccccaggcgtctccaacgaagcccagtatgtgttcaccatccagagcatcgtcatggcgcagaagctcaaggggaccctgtccttcattgccaagaatgacgagggtgcgacccacgagaagctggacttcaggctgcacttcagctgcagctcctacttgatcaccactccctgctacagtgacgcctttgctaagttgctggagtctggggacttgagcatgagctcaatcaaagtcgatggcattcggatgtccttccagaatcttctggcgaagatctgttttcaccaccatttttccgttgtggagcgagtggactcctgcgcctccatgtacagccgctccatccagggccaccatgtctgcctcctggtgaaaaagggtgagaactctgtctcagtcgacgggaagtgcagtgactccacgctactgagcaacttgttagaagagatgaaggcgacgctggccaagtgttgagagctgcctgcgagccccgcaccaccccgcggagcacgtacccagggaccgcagccctgacgtgtctcgcctctcctcagtcgtgtgtactgtacccaagcctgagtgttaatttaactctatgttgtccgccgtgtagacatccgaggtcatttgttgcgttgaattatctgaccatccttttttactgtgactcttcccattctctttggcaagaagtccccttctcgcccccaaaccagcaagggactcccccacctgggtctgtgccctgccccgcgctgggggccgagtccttgaatgtggcttcaggggctcctgtcctgggccagggcctgatgggcaccacgtgaggggcacttggtggacagggcggggctgacgtggcctcctctggggtcgcctgcttttgacccaaaggtcctgacggttgcgtccgggggaggggaaggaagggccgctgtcgccaaggttttctctcccagaacccacagtgggaaagcggtcttgccaggcgttgtccattgtcagtgtgctcgtgggctggtgactgggtcttgggatcccaggccacgcgccagccaggctgtgggcagggcggggccagggacgccaaagagaggttgcagtcagaaccgtggacggggtgggttgaggcctctctgccacccgtcttcctggtcagcagaagtgcatctcggcttgggtttggggtggtccgcatcccctgcttgccactatgcgcaccaaggtttccccacatccttcccagcacccttaggaaggcccaggcagggcctggaagcagcggacctgggctgttctgtgttgaaggagtgtgcccagtgcccttgggcaggacctgtgagagccacctcacaggcagagcccccaccaggcagggcaaggagactccgctcactccccacggccagcgtgggcacaggactgacccttcttcagagataatgacattttatcttctccttttgatgaaaactgtcactttagcatgtaatccattacagaatcccatgcagtgattccaggatttgaaattgtatgatgtgttacataagaatttatttgctatcgacattcccgtataaagagagagacatatcacgctgctgtcatgattttgtgtcaagatgatccaataaagttgtaaaacaggca

SEQ ID NO: 2602 - protein, 1106 aa, Homo sapiens
MALKMVKGSIDRMFDKNLQDLVRGIRNHKEDEAKYISQCIDEIKQELKQDNIAVKANAVCKLTYLQMLGYDISWAAFNIIEVMSASKFTFKRIGYLAASQSFHEGTDVIMLTTNQIRKDLSSPSQYDTGVTGLSCFVTPDLARDLANDIMTLMSHTKPYIRKKAKLIEPLTNLIHSTSAMSLLYECVNTVIAVLISLSSGMPNHSASIQLCVQKLRILIEDSDQNLKYLGLLAMSKILKTHPKSVQSHKDLILQCLDDKDESIRLRALDLLYGMVSKKNLMEIVKKLMTHVDKAEGTYDELLTKIIDICSQSNYQYITNFEWYISILVELTRLEGTRHGHLIAAQMLDVAIRVKAIRKFAVSQMSALLDSAHLLASSTQRNGICEVLYAAAWICGEFSEHLQEPHHTLEAMLRPRVTTLPGHIQAVYVQNVVKLYASILQQKEQAGEAEGAQAVTQLMVDRLPQFVQSADLEVQERASCILQLVKHIQKLQAKDVPVAEEVSALFAGELNPVAPKAQKKVPVPEGLDLDAWINEPLSDSESEDERPRAVFHEEEQRRPKHRPSEADEEELARRREARKQEQANNPFYIKSSPSPQKRYQDTPGVEHIPVVQIDLSVPLKVPGLPMSDQYVKLEEERRHRQKLEKDKRRKKRKEKEKKGKRRHSSLPTESDEDIAPAQQVDIVTEEMPENALPSDEDDKDPNDPYRALDIDLDKPLADSEKLPIQKHRNTETSKSPEKDVPMVEKKSKKPKKKEKKHKEKERDKEKKKEKEKKAEDLDFWLSTTPPPAPAPAPAPVPSTDECEDAKTEAQGEEDDAEGQDQDKKSPKPKKKKHRKEKEERTKGKKKSKKQPPGSEEAAGEPVQNGAPEEEQLPPESSYSLLAENSYVKMTCDIRGSLQEDSQVTVAIVLENRSSSILKGMELSVLDSLNARMARPQGSSVHDGVPVPFQLPPGVSNEAQYVFTIQSIVMAQKLKGTLSFIAKNDEGATHEKLDFRLHFSCSSYLITTPCDAFAKLLESGDLSMSSIKVDGIRMSFQNLLAKICFHHHFSVVERVDSCASMYSRSIQGHHVCLLVKKGENSVSVDGKCSDSTLLSNLLEEMKATLAKC

SEQ ID NO: 2603 - DNA, 4853 bp, Homo sapiens
ttgcaaggggcccggagcgggatcgcggcacctgccgagcgggtcgccgcctctgccgcggtccttggaccccgccgccgccctggcctgggagcttgccccgccgcagcggccggcagcgcggcgctccgcgggcggcaggcacgggccccgggccccctcacggcgcccagccgcgggcctcccgaggcaaaagcccgtgggccgccgcgatggccctcaagatggtgaagggcagcatcgaccgcatgttcgacaagaatctgcaggacttggtccgcggcatccgtaaccacaaggaggacgaggcaaaatacatatctcagtgcattgatgagatcaagcaggagctgaagcaggacaacatagcggtgaaggcgaacgcggtctgcaagctgacgtatttacagatgttgggatacgacatcagctgggccgccttcaacatcatagaagtgatgagtgcctccaagttcaccttcaagcgaattggctacctcgctgcttcccagagctttcacgaaggcaccgacgtcatcatgctgaccaccaatcagatccgtaaggacttgagcagccccagccagtacgacacaggtgttgcactgacgggtctgtcctgcttcgtcaccccagaccttgccagagacctggcaaatgacatcatgacactgatgtcacacaccaagccctacatcaggaagaaggctgtgctgatcatgtacaaggtgttcctgaagtaccccgagtcgctgcgccctgcctttccccggctgaaggagaagctggaggaccccgaccccggggttcagtcggctgccgtcaatgtcatctgcgagctggccagacgcaaccctaagaactacctgtccctggccccgctctttttcaagctgatgacgtcctccaccaacaactgggtcctcatcaagatcatcaagctgttcggtgctcttactcctttggaaccgcggctgggcaagaagctgatcgagcccctcaccaatctcatccacagcacgtctgccatgtctctcctctatgaatgtgtgaacaccgtgattgcagtgctcatctcgctgtcctccggcatgcccaaccacagcgccagcatccagctttgtgttcagaaattaaggatattgatcgaggactccgatcagaacttgaagtacctggggctgctggcaatgtccaagatcctgaagacccaccccaagtccgtgcagtcccacaaggacctcatcctgcagtgcctggacgacaaggacgagtccatccggctgcgggccctggacctgctctatgggatggtgtccaagaagaacctgatggagatcgtgaagaagctgatgacccacgtagacaaggcagagggtaccacctaccgtgacgagctgctcaccaagatcattgacatctgcagccagtccaactaccagtacatcaccaacttcgagtggtacatcagcatcctggtggagctgacccggctggagggcacacggcacggccacctcatcgccgcccaaatgctggacgtggccatccgcgtgaaggccatccgcaagttcgccgtgtcccagatgtctgcgctgcttgacagtgcacacctgctggccagcagcacccagcggaacgggatctgtgaggtgctgtacgctgccgcctggatctgcggggagttctcagagcatctgcaggaaccacaccacactttggaggccatgctgcggcccagagtcaccacgctgccaggccacatccaggccgtgtatgtgcagaacgtggtcaagctctacgcctccatcctgcagcagaaggagcaggccggggaggcagagggcgctcaggccgtcacccagctcatggtggaccggctgccccagtttgtgcagagcgcagacctggaggtgcaggagcgggcgtcctgcatcctgcagctggtcaagcacatccagaagcttcaggccaaggacgtgcctgtggcagaggaggtcagcgctctctttgctggggagctgaacccagtggcccccaaggcccagaagaaggttccagtccccgaaggcctggacctggacgcctggatcaatgagccactctcggacagcgagtcagaggacgagaggcccagggccgtcttccacgaggaggagcagcggcgtcccaagcaccggccgtcggaggcggacgaggaagagctggctcggcgccgagaggcccggaagcaggagcaggccaacaaccccttctacatcaagagctcgccatcgccacagaagcggtaccaggacaccccgggcgtggagcacattcccgtggtgcagattgacctctccgtccccttgaaggttccagggctgcctatgtcagatcagtatgtgaagctggaggaggagcggcggcaccggcagaagctggagaaggacaagaggaggaaaaagaggaaggagaaggagaagaagggcaagcgccgccacagctcgctgcccacggagagcgacgaggacatcgcccctgcccagcaggtggacatcgtcacagaggagatgcctgagaatgctctgcccagcgacgaggatgacaaagaccccaacgacccctacagggctctggatattgacctggataagcccttagccgacagcgagaaactgcctattcagaaacacagaaacaccgagacctcaaaatcccctgagaaggacgttcccatggtagaaaagaagagcaagaaacccaagaagaaagagaaaaaacacaaagagaaagagagagacaaggagaagaagaaggagaaggagaagaagaaatctcccaagcctaagaagaagaagcacaggaaggagaaggaggagcggaccaaaggcaagaagaagtccaagaagcagcctccaggcagcgaggaggcagcgggggagccggtgcagaatggcgcgccagaggaggagcagctcccgcctgagtccagctactccctcctcgctgaaaattcctatgttaaaatgacctgtgacatccggggcagtctgcaggaggacagccaggtcactgtggccatcgtgctggagaacaggagcagcagcatcctcaagggcatggagctcagcgtgctggactcactcaatgccaggatggcccggccgcagggctcctccgtccacgatggcgtccccgtgcctttccagctgcccccaggcgtctccaacgaagcccagtatgtgttcaccatccagagcatcgtcatggcgcagaagctcaaggggaccctgtccttcattgccaagaatgacgagggtgcgacccacgagaagctggacttcaggctgcacttcagctgcagctcctacttgatcaccactccctgctacagtgacgcctttgctaagttgctggagtctggggacttgagcatgagctcaatcaaagtcgatggcattcggatgtccttccagaatcttctggcgaagatctgttttcaccaccatttttccgttgtggagcgagtggactcctgcgcctccatgtacagccgctccatccagggccaccatgtctgcctcctggtgaaaaagggtgagaactctgtctcagtcgacgggaagtgcagtgactccacgctactgagcaacttgttagaagagatgaaggcgacgctggccaagtgttgagagctgcctgcgagccccgcaccaccccgcggagcacgtacccagggaccgcagccctgacgtgtctcgcctctcctcagtcgtgtgtactgtacccaagcctgagtgttaatttaactctatgttgtccgccgtgtagacatccgaggtcatttgttgcgttgaattatctgaccatccttttttactgtgactcttcccattctctttggcaagaagtccccttctcgcccccaaaccagcaagggactcccccacctgggtctgtgccctgccccgcgctgggggccgagtccttgaatgtggcttcaggggctcctgtcctgggccagggcctgatgggcaccacgtgaggggcacttggtggacagggcggggctgacgtggcctcctctggggtcgcctgcttttgacccaaaggtcctgacggttgcgtccgggggaggggaaggaagggccgctgtcgccaaggttttctctcccagaacccacagtgggaaagcggtcttgccaggcgttgtccattgtcagtgtgctcgtgggctggtgactgggtcttgggatcccaggccacgcgccagccaggctgtgggcagggcggggccagggacgccaaagagaggttgcagtcagaaccgtggacggggtgggttgaggcctctctgccacccgtcttcctggtcagcagaagtgcatctcggcttgggtttggggtggtccgcatcccctgcttgccactatgcgcaccaaggtttccccacatccttcccagcacccttaggaaggcccaggcagggcctggaagcagcggacctgggctgttctgtgttgaaggagtgtgcccagtgcccttgggcaggacctgtgagagccacctcacaggcagagcccccaccaggcagggcaaggagactccgctcactccccacggccagcgtgggcacaggactgacccttcttcagagataatgacattttatcttctccttttgatgaaaactgtcactttagcatgtaatccattacagaatcccatgcagtgattccaggatttgaaattgtatgatgtgttacataagaatttatttgctatcgacattcccgtataaagagagagacatatcacgctgctgtcatgattttgtgtcaagatgatccaataaagttgtaaaacaggca

SEQ ID NO: 2604 - protein, 1147 aa, Homo sapiens
MALKMVKGSIDRMFDKNLQDLVRGIRNHKEDEAKYISQCIDEIKQELKQDNIAVKANAVCKLTYLQMLGYDISWAAFNIIEVMSASKFTFKRIGYLAASQSFHEGTDVIMLTTNQIRKDLSSPSQYDTGVTGLSCFVTPDLARDLANDIMTLMSHTKPYIRKKAVLIMYKVFLKYPESLRPAFPRLKEKLEDPDPGVQSAAVNVICELARRNPKNYLSLAPLFFKLMTSSTNNWVLIKIIKLFGALTPLEPRLGKKLIEPLTNLIHSTSAMSLLYECVNTVIAVLISLSSGMPNHSASIQLCVQKLRILIEDSDQNLKYLGLLAMSKILKTHPKSVQSHKDLILQCLDDKDESIRLRALDLLYGMVSKKNLMEIVKKLMTHVDKAEGTYDELLTKIIDICSQSNYQYITNFEWYISILVELTRLEGTRHGHLIAAQMLDVAIRVKAIRKFAVSQMSALLDSAHLLASSTQRNGICEVLYAAAWICGEFSEHLQEPHHTLEAMLRPRVTTLPGHIQAVYVQNVVKLYASILQQKEQAGEAEGAQAVTQLMVDRLPQFVQSADLEVQERASCILQLVKHIQKLQAKDVPVAEEVSALFAGELNPVAPKAQKKVPVPEGLDLDAWINEPLSDSESEDERPRAVFHEEEQRRPKHRPSEADEEELARRREARKQEQANNPFYIKSSPSPQKRYQDTPGVEHIPVVQIDLSVPLKVPGLPMSDQYVKLEEERRHRQKLEKDKRRKKRKEKEKKGKRRHSSLPTESDEDIAPAQQVDIVTEEMPENALPSDEDDKDPNDPYRALDIDLDKPLADSEKLPIQKHRNTETSKSPEKDVPMVEKKSKKPKKKEKKHKEKERDKEKKKEKEKKKSPKPKKKKHRKEKEERTKGKKKSKKQPPGSEEAAGEPVQNGAPEEEQLPPESSYSLLAENSYVKMTCDIRGSLQEDSQVTVAIVLENRSSSILKGMELSVLDSLNARMARPQGSSVHDGVPVPFQLPPGVSNEAQYVFTIQSIVMAQKLKGTLSFIAKNDEGATHEKLDFRLHFSCSSYLITTPCDAFAKLLESGDLSMSSIKVDGIRMSFQNLLAKICFHHHFSVVERVDSCASMYSRSIQGHHVCLLVKKGENSVSVDGKCSDSTLLSNLLEEMKATLAKC

SEQ ID NO: 2605 - DNA, 51097 bp, Mus musculus
  misc_feature (1)...(51097): n = A, C, G or T/U
ctgatgctggcactgggggtggagccctgcatcttgctcattccctataagctctctcaccattgggcaacaacctcatctctctcatcccatctctatacatttctctatgctgtcagactgcaggacagtggtggtatattggaaggtgtgtgtgtgtgtgtgtgtgtgtgtgtgtgtgtgtgtcctagaaggctggtcctgttgcttgagctgaggatagtgatacagcagacctacttataaagaagtaaaaaaataacccaaatgtgtgtgtttcacgtcaaataaacttcaaagactttcgagcaagtggtttcttgccttggagatgatttaaggagctgtgaaaagccaagtcaagggtggttctctgtgtgcaaaaggcaccaagggctggttattagaagtaaggagaatggatgccagaatcgaccttgggcccatgcctggaacttgagagtgtgctgcggtctccagggcctcactagccacttagaaactccctgggaagctgggactaaaccaccccagcttgcccaccaggatggattcctttgccattttgatgaagaaggacagaaaatgcctttatcttcaatgataactccagtgtcattggggccaaacttctggcttactctctcccggggaagggctggagggagcagagctgaaggatcagagccgtcctttggctacatctgggtacgctgaccctgctaccacctgtgagcaaatagaaggctaagttagttggtctccagtcagcacagcagatacagtcacttcaagctcagtatttcccaaggcctctctggaatagcagacattaacaatgccacaggcaattacgtctaaatgctcatggtccatttccccaccccctgctcccgccccagttcttaactcttggcggttcccagtaacatctgggttcccaggagtttgagaaccacagcctcggtcccagtctgtgccatttctaacctggagaaacttggcctaggacccctatcttaggctgcgtttggcctccctgacggctgtgttttgtctacttggcggtgtgcagcagaggaggaaaccagtggtgtttgaggaagccgatgatgctctcagggaggaagcaaatggtgtttccacttggcaaaggaggaaactgaagcttggagggctgtaccactttcctggtgtctctcctttaggagtagaggtgcaatataaagtccaggataggcttgggtgaatagagaaacactggtgggctttgctttggggttttaatgatatgtggcatttgggggtacgaggtaggcatgaggagttctagaatcaccttgagtcctagttagggttcccattgccgtgaagagacgtcatgacccgagcagctcttataaaggcaaacatctcactggagctggcttacagtttcagaggttcagtccacgcaggcagacatggtgctgaagaaagagcttgatttgaaggcagccaggaagaagaccattttccaggcagctaggaggagggtctcaaagcccacccccactgtgacacacttcctccaacaaggccacacctcctaacagtgccactccctgaatacgccaagcatatacaaaccgccacaccctgtttgtgttctcagatgagaagtctaacaaccaaaactaatccgtttgttaggagacatttaatgccaagaaagtgcattttctgtgatatctgggatgtggggtgacttggagcaactctttttttttttttttaatggaagtataaagaaatgaaaattggaaaggtaaaagaaaatgcagaccttttctcttgttttccccaagctataggtggtggcacattccatagctaatgtcatgcttctctgtgactacaaacagcccatacatggtcttaccaaagactactgtctctcattcctgatgtcaggcaagatctccgtcccccatctccatccccttcttcttaccagccagtctctttttgcttttacgtccttatttttgatgacccaatgattttcattcgagttgcttacaagacatgggcgtcataccaatcggctagaccactgaagaaaatggcccaccctctcctaccaaccactctcaaccatagaccttttagtgagtcgcatccctttccatggcaggatgccgatgagcccaatcttgtgcggataattgcagttgctatgagctcaagagagcaatggccatgccatgcccagaacgcaaggttttacaatattttattccatcccctggccttcaagttctttctctcccctcttctgcaatgtcctctgagtcttagacgagatgacacagatatcccatttgtgactgagcaggccccagtcacttactcttgtcaccatgtctatgtatgcatctctgcacttaccactgactgctacagaaagaaacctctttcaccacagttgacagcaccagccaatggacataagcatgatgatgtagaagacaatttgatggacatatcatgtctgtctagcaaaaataacagtagtagccttcctattagggcctacaacaaacattttgcctaggtttataaaccaggaattaattccctcccatggaacaggcctcaaagtcaagcagaaagtggttggccacgcccacaacagacttgcccctgctgcgggaggggtgcgtcttgcctggctgattggtaggactgctttctggcttcactgaacaagaccattgatgtcaattctccccagtcagtcattatggtctcttgtggcacgttgggggctagccagcagcgaggaagtttccagcctggctctggttgttctgatttctctgtgtcctgtgaccagagtatggggtgtctttaccaagaggtcttaccagctccttttggcaggaaaccaatagcagatgctattgccagcatcatttcagacatctcagggtccccttggccaacagtatagggaagtagccacctcccccccaataagatttccagttactaatgcatgactgtgtctatttgtacaagttacctctgctcaaactgtttttaatttttagattttactcttaattgtgtataggtgtgtgcatgtgtgcatctctgtgtgtgtatgtactcctgagtgcaggtgcacacaggccataagacagcataggatgccctggaactgtattacagatggccaagacctgcctgactggtctaagaacccagcttaggttctctggaggaggatactctcatagacatcaagctatctctccagccacctgttcagagctttgaaaatgagctaagagccagacttttacagccttttttatacattcttagttttgattggctctcagatctctcattcacccctctgccccacccccttgacctttttacccccagtatctgtctcctacttttgtatcacgtgtgttctactagcatccctcaaagcttctctctctctctctctctctctctctctctctcactcactcatacacacacacacacacacacacacacacacacacacacacacacacacaaacacacatacacacacctttaatcccagcatttgggaggcaaaggcaggcagatttctggggtttgaggccagcctggtctacagagtgagttcaggatagccagggctacacagagaaaccctgtctcaataaacaaacaaacaaacaaacaaacaaacaaataaataaaatatttatttggagagatggcttaggagttaagagcacatgatgctcttatagagcaccaggactcacatatggctcacaaccacctgtaactccagttccagagaatctcatgcccttctctgacctcatgtgcacaaaaggcacacataacacacacacataagtccaagcagagcccttagaatcaaacatgccttttagaatgtatttattggccacttgtatttcttcttttgcagattctccattctgtttcttagatcaatatctaagttgaactgtttggtttcttgtttggttttgcgggttctgtgtgtgtcctgggtaagatctctcagtcagatgtatatctagcacagattttcttccattctgtgaggctctctcctcacgcagattgcttcctttgctactcagaagcctcttcactccacgggctgcactgttgagcgctgaccctttctgagccgctggagtcctatccagaaagttcgcgtctaggactgtgttttccctctagcaactggagagtgtaaggtctttgatccgttggagctgatttctgtatggggtgagaaataaggacctagttttgttcctctacacgcagatactgagctttgctagcgccagtttaaagagtctacattttcctccagtgtgtgtctttgacatcttcgggagccacagactcttggtgccacaaagatgtcaccaaattaggaggttgactgaaattagtaaaactgaaaaccaaaattgtcaaattgcctaaaacaaacaaacaaacaaacataaaaccaaccaaccagatctgttggttcgaatgaaacaaaagtttagaattggggccagaaataagtgacatcaggacaagatgtcagcgttgctatccccatctgcttagtgtggtcatcctctagatgggctttctcgttcccagtgctgcctggtcctcttgagaatctatctcataggttcaaagcgcatgggaaagagaaagcaccttggtcactttgttacccaaagtgctgagatcttccgcgcttgcgcaagagtaggccatatggccgctctggatgtaagcaagtacttaacgctatatcttgactgaacctgggtagctgccctcctggggctgggccgagacttcattaggaccagatatgcaggaagtactgagaagctatgatgccacaggtgtccagtcacctttcttagaggtcactgacatcagcatatccttactagagggtatggatccaggtcagcaatgcacctcttgtctccagcactcatagctcccttagtcattctgcttcacacacaaccaggagctctctgtgagtcgtagaagaccacaaggtaagggtaatctaactcacctgtttgttttcccagtgacaactaggtctcagagcatcgaagtgcaggaccacgacagagagggacgtaacgggatgcctgtggaccagtgttctcctgctctgaagtggcagccataccaaagtgttccttggcatagcttgttaaacagccgttacgaaaaactgtaagtggtctttagcagtgccttgggatggacgggggacttcgtgtcacacgtggagggagtgttgtattttaggactgaatccaagtatttgggcttaggtgccagccctgatcaaaccagctgagccattgagaaggtatctgtcctgtccctttatattttgtatcttaaataaagaatcgttgggacaaaggctcctggcttttaagaacccaggcttgtaattacaactcactacaatttacccgctaaatgttggaggagaggaacttttcctaggattacatgcccagttagaaaaagaagtgcacgtgtgggtatgggggctggccagatggctgagtaggcaagggtgcttgctgtcaagttggttgacccgagtttgatccctggtacctgtatgaggggagaaaactaagccctataagttgtcctatgacgtccacgtgtgcatcactcccagaataaatattaaaaataaaatagaaggcaaaaaggagacaccgggaaataaccaatacctcgttctgcagtaaatgtgtgatacccagaattctcgggtagacacgttaagttggtgacctgtgtctactcctaacatctatgccgagagtcagcgttgttaggttctgactgaggagtccagttttcaagtcataaaagcaccatgaggtgagaaatgtcagacagtgcctttgagggtctttttggcatcttctaagttgacatacagcaactccgggacagttatcctggggaggctacaggaaaaaaagcttttcttgagtcaagcctaaggagtctaagggagttggtgtgtattcggtggcaaaagaagctaatttcattgacatgtcacacctgtgcctgggtgatttctatgtgcaattagaaaacaaaaggtaagcttctagcccttgcttccgagtcagccttcccttgattatctcatggagaacatgtcatgttctttctgaagcatgaaactgtcacgcgccaagtgtgtgttttagtaaaagaccttcctatctccatgcatctgagttggcaaactttaaaggtgagacctctctctctctttctctctctctctctctctctctctctctctctctctctctctctctctcaccataagagactttaaaaacatgtttctttgaggtttagtgcctagaagcatccgtgcatggttctgagttccatgcctgggacccacaagatggcagaagagaaccatctgacctctgtttgtgctggtgctctagagccttcagtcacagacagcatacacacaggcatgcacacacacacacacacacacagaggcatgaacacacacacacacacacacacacacacacacaggcacacacacatgtacacacacacacacagaggcacacatacacagaggcatgcacacacatacagaggcatgcacacatacaggcgcgcgcacgcacacgcacacacacacacacacacacacatacacatatacacacacaggcgcacacacacacatgcacacacctgtctatttccgcagtctgcccaagctccactgacctggaaaaaaggaggacacagacagagtcaactcaaaggcacagaggcacatttattttcaacacttagccaacattcactttttctaaacaaacagaaaagcaatgttcacagagatgataattcaagctctcttgatttgactattcaactcactgagatagaaaatcatttatttgtttataggtaaatatgtttaatttgttacaaaaaaaaatgttgttaccctagattacctcagagcaacggagttaggggttaacacttattaacccttcctttcctgaatgttttaagcatatatgacagaagagagtttgcaaagcaagtttggttggcttcatggctttttggtgtcacaagaagggttgccttggtgcagcaaatagaatgaatttttagttggagattgtcgcagttcaggacaatttcattggtccttctctttctgcgtacagctgttccgcagctctgtctcgtgctcatgtctggctgcaaggcctctactctcagggttttttgacagagaagtatgaaacattgtaaacatcttcctttttcaccaagacagttattatcatccatagtaagtcagtgtaactttatccatccagcctttagccttgggcttcttaaacattttatcctcacaaccctttgcctgagcaattgttaaatgaccctgggaaggtatacacacacacacacacacacacatacacatgaaagctacacaagacattcgaaccacaattctttgctataaacataatctcaccatttacagaagagaaataactctgtacactaacaagatgggtgtgcttgttaatttttacttagataattaaatcttgactcaatatttaatactgtaggacatggaataactttatcattttccagagttggtagatgcttttggttttgttattgttaattctgagaacactgactcatacacacacatacacacacacacacacacacacacacacacacatatatatgtatatatatatatacacacatatatatatgataaaactatgaaaggtatatttcaagccctttcagaaaatattcgcaattctatccaaacactaagccaaaattcatttaattaatttttttaaaattgaaagtctagttgaaactcaaacagcaatttttaaaatcaaatattaaaacccaatccaatccaatgataaactaacttgtttgatctctatatcctgagtaattatgataggaaaatattaaaaattattttctgtcatcaaatttttacctttctgaagaataaaagagtttgtacagatggtagaaatgctgcaattcataacgtacaacagtttgggatgtgagctgtgtgttaggtagcatcattggccttgtgtggtatgatggtgtgcatactacagcacatgttctgaactaagagtacagcgatacccttataagatgacgcagcatgaacaaacgcagccagaaacactatagattcattgcccatttgattttaattaatttctggccactgtgtatccatcgactttttacttgttaccaattttttttttgtcacctagattttgcccgttcagttatatggcccctgtgtcgggttctgagccacactgcaagaagagcattagcggactgactggaaaccagagtcacggtcaagttcctagacagcataaggcacatagtcttggtcagagtctttgttcagtggttttcctttgctgctgctggtcactgcattggctaggcctttgattggttattggaaggtatccatgatgcagggacctgattcactggcagggactcaactcagaaagcacacggacattcctttcccaagagacccatccatcgtttccgctttggggattagagcaaaacgtccaagttctgtgcttttgtgatagcagcagccagcttggctgaggcctcagaggcagggagcctcacaagagaccagtgggtacccacttcctctcactcgtgcctctgagaagaaactgctttcataaactaaaagtcctttcttaggagcctcgatgaactaaggatcatggtccacgttagcaacgtgtacaggaaaagctcatcaaggaggttttcaacattcatacttccatgtctacttactgatgttagcatctcatgtgtccagttcactaatgtttttgttagtcatatgtctgtatgtgggtgtgtgcacaggcataatttggaggagaaagggggttgaattctggaactggagttccaggtgggcgtgagctgcccaaagtgggtgctggggactgaactcagatggtctggaagagcagtgcactctgggctgcagagggggctcttcagagccccctttcattaacacttaaaagtacttttattgatcatgttatagtcacagcgttactattggaactactacataatacaaaatcccgactacccacgctgtcaccaccccagccctttatgcgaaagaaatcctgtggaaagtattcattgctgtttcctagctggaaaaatctaagggaaaaagaatattctagggaggagaatgtttccaatccggacaatgactggcactggttaattcgctttagggttgttccgggcagttctgcccagcctgctttttttgttgttgttattttttggttttttttttgttttttgttttttgtttttacaatcagagggctgaacattcttacacctgcgtagctgaggctcctgtgaaacttagaagcttctttttcaagggagtagatgaattgtcctccagataattctaagcgatgtggtgtcttctcagcttccagcaccccgtttcgagtgcacggtgtagagtccgattaaaggcgacagagtccagagaaacaatgcttccattccgcagaattcccactgcttccttgtcaggagatgagaaggccagtgtgctgcgaaatatcattttcatttctgcagtaaaaatgccggaagtgggttgaatgaatgttgctaagggccctgggcacaatgggctttcttgacgacaaagggaaatactgtgcagctggtttcttgattcctcttctttcaggcctgaagtgggctatcaggttgtgacagacaaagggttcactttctcgccagtcgatgaagcttttgtttgtcaaaagaagaaccatttccagataaccgtccacatccaagtctggggaagtccgaagtttgttaagacccaagtgggcctaaagccaatagaaaagttttacttgaaagcttttggaattaaggtaggccttttgttcattcaatttacctgaatccctatttctttctttcttttgtttttaagctttatttatttatttatttatttatttatttatttatttatgtatatgagttcattgtcgctgtctttagacacactagaaggaaggcatcagatcccattacagatggttgtgagccaccatgtggttgctgggaattgaactcaggacctctgcgtgaagaggagatggcgccggttcctagctgaggtccagcagctttttagaaagattgttccagtgtgaacgcccacgcgctgtgtctcagagcactgtgatagcaccgttcacagaatagggtgtggagcagctgtaggattgcttccttatcttacttattacttacgtattacttatgtgtcaagtcatcatttcttcatattagaacttaagttctgccaggagtgtgttagtgtgtgtgtttgtgtgttagtgtgtatgtgttactgtatgtgtgtatgtgtgttagtgtatgtgtgtttgtgtgttagtgtgtgtgttagtgtgtgtttgtatgttgtgtatgtgtgttagtatatgtgtgtttgtgtgttagtgtgtgtttgtatgttgtgtatgtgtgtgtgtgtttgcactcacatgtatatgtatgctagacaggatcaaattgatgattcatgcataactaggcaaatactctaactctgggctctacccaagacttctttttttttgttttgtttttttgtttttttgctgagatgtgatctcacgaaattgcccatgctgttcctgttttcatttgttgcccaggcaagcatgaactagatgatccacctgcctcagcttcccaagtacctaccattccaggcctgtaccacgaggcctagtgatttttattcacttaaaagttatgcccatcaatatgtattaattgtacatagtaatggaattcgctgtattttcacatgtacacccaagtgcattggtcttgtccatttccaattttatcacatttcttctttgttcacttatctgaatgtctacagcagtgcctggcacataataggtgctcactaaatagtgaatgaatgaatgaatggatggatggatggatggatggatggatggattatttgagttgtcttggtcttgtttagtttattttttatctttattcattcttgcttctgagatattggtcttttaattgcacactctgtatttcatcgtttacttctgcctcgaacaagcatatctctctttaagcagcagcggcacactgctgatagacggtggccattgtctagtctaatatggcattttcagaattcagaccttccatggagcctagcatggtaccctggcaaaggttttaagcgtctgaacattttctactaatggatactattttagtatgttaattaatctattaagtaattgttttacttttgttttgttttgtttacccatacaggtggaagccaccaaccaagtgattgccatagaacagtctcaagcagatagaagcaaaaagacttttgatcctgttaagtaaggtgttcttttctgagtgtcatcgtgaagtttagggaagaagagtgatattatttctttttcttttttgctacttaattagcattttggttttttttaaatcaatcattttatttgtttacatttcgaatgttatcccccttctgggttacccctccacacacccctcccatcccatcctccctcccctttgcctctatgagggtgctcctccacccactcacccactcccgcctcaccgctccagcatccccctatgctggggcatcaaaacgccacaggacgaagggcctcccctcccattgatgtcatataagccatcctctgctacataggcagctggagccatgggtccctccatgtatacaggatgccagtattataaacacctgttatgaaaaggtccccctggaaattcaccactcttcttaggcgctttgatagcggatggacttacgaacaacttgattccttgagacagaacatggctagatattttaatttttaatttagattagtgccattttggttgagttgactttgaggtttcctttctctgcacgcatacagctcatttctccgtgtattgtatggttaccttgacagacgccgggctgaaagctgacgctcgtggtaatattcacagcagtagtgaagtaaagaatgagagtcctctctctagaatggcatgaggtgggaactgtgtcttggtttatttggccaggatacagatggggtagcttaggctaactgcagctgagcccatttggggcaggatggtccttcagcctagacagagccactcacacaaactgctgtggagttcaggttctcgagcaagcatgtgacttggtgcatggggctctcccttgcttgggcaggctacatggcttttcatggaaagatgctgtttcctgtggctaggctatgggaggtcacctatgtgaagaaaaagccagagtgttcaggaagaaaagaagtgatttgtgaggagcagggtgctatagcaacagtgcagagcccatgagagtttgttttctccctcccgctgtggaggccacagaaaccatttgggacatgctgagttcatggtccttgggttgaaacctgaagcgtagcttctactagaaagttcttttctgtggccttccttgatggacacttctacccacgctgtggagccctaagtaacaaaccctaggataaacatcctctgcactgtgatgatagcaggggaccaaacatccgggggtctcagtggcttagccgtgatcaagtgctgcgttctcttatgtctctcgatacttccgtttgttttagaatcgacctcctgactgaccaggttaccaaagtgaccctgggacgattacactttagtgaaaccacagcaaacaacatgagaaagaaggggaagccgaatcctgatcagaggtacgtggggcgccgtgaatgagaatgaccacacatgtgacctagccaggacctcctgtgcccctgtgacccttcgggccacccagccagcacactcagccagcatcggggattccctcccttctccgacttggtttattaatgtatctcatttgcccagatatctcctgtcctcactctcagcaatgctcaaattcccttcatgcttctctagatgggtgcctacgtgttctgctcattgctctcggttctgactgcaccaaatctacacgctactcctggagccccgccccctttttttaacagaagagaaaagccaagcagactggcatacacctgcagtccccgcacttgggagtcagaggcaggaggatctttgagttagatcaaggctaaccagagctatgtagtgagaccttatctccaaaaccaaaaggagaaggaagaaaaaaaaagaaaagaaaaaggaacagaagaagaactgacaagggaaagccttagcaatgtacacctgtctccttgagcggcctggcccaggaccagcagagatggctgctacctgggcacatttggaaatactcagttctcacgcctcaccgggttctgctgactccagtgttggcaagtgagcttggtcagctgtagctcaccaaacctctgggtggttctgtcacgggctcaaagttgagagccactggtctcaggacatccgctttgacgttgagtgggactgagtttagacaggaccctgttagtcactagctcagtgaccttgggtgtgaagcttaagccatctgaaactaatttctgtctatggctgtaccacctcgaatgttcctggtctcatctagaattcatttcctgtgctgtcaagtgggtgcgagagcaatacttacttgctccagtacattttggggagatcttaatggaggtgagctgcttagccccctgcatgaccccttctgagtcctccgtgggagttaatgacgacagacacaatcattataaatagtgatttgatttagttcaaaggcagcatctacattgtctagaaactggagtggtaatgtgaggaggtcgggtgtggctcaggagttaggatcccagccacaggaggtgccacactcagggtaaagccctaccaccaccctcaaagccccggtgcctaagagaaagactttttctgtcttctagaagaggagattatctctcagttcccctacctgagattcacagccgagtctgggtgtgtgtgcctcctggcttctcttggatccttttgtgtttgttttgttttgttttttttgagacagggttttctgtgtagccctggctgtccttgaactcactctgtagaccctgccagcttctaactcagagatctgcctacttctgcctcctgagtgttagggttaagatcatgactgaccacctcccagcctttgatccttaagttgtaattctacgaagagcaaggaggtgtggcctggaaaacattttctcgccccacccccagcccctaacatttattttatggctatgactgtttttcctgcatgtgtatatgtgtatcacatacctgcctactgctcatggtggtcagaagaggatgttggcctccctggaactgtagttatggatgctggtaaaccactgtgtagatgctgggaactgaatcttgttcttctataagaacaagcgttcttaactcacgagccatcacgtctccagccctgggaagataaacgaggataaatgtcgtgggggagtttctgccttgacttccaagaaacaaccattaagattatccattaaaccaataataataaccatagccttaagattgtctcactgatagtccatgtgaggagatacttaagtacctgcagtgaggtttgctttgggagggctagagggaggtccaagtctttggctatctatacttaaggcctgagggcattgagaatggaggatacctggagcaagtaaggatgagatggaaccaatatgatggacatattctctaagtctccctcccttaaggcccaggacctgtggcttatatggttgtggacacagggaccctggtggctttgtcctgtgtttgtaaagagcgcttcagcgatgctccagggtgaggcctgggtgagccacataggtgggctgagctcagtgcctgaagttctccccagggagcaggcacacagaaacacctgggacagtagcaagtcagccaattgtccttccagttcaccgaggcatctctgagataggaagggaaggcagtctgtacgtaagtgaacccgtctggctgagctcactattaatgaaatgccagatgctacttcgttgcacaaatagcatctctgttctttgatatgcccccatcagtctgttgtttccgaactaggtacttcatgttggtggtcggattgtacgctgctaaccaagatcagttctacctgttggctgcccacatctctgaaaggatcatcgtaagggtaagcgcaactctctggttttctggaccacatatacttttctcccttgcaggaagaagttgaactgtcagcgacatagacatacttgagctgtgttatttcctaaccgttgtcggtaatgataatagcagaaactattgtgttagtttttatactgtggttctcaaccaagatcacagtgaacagagatgatgggcaatacacggggaaccaaccattcccactggaagtattccctccccaaatgccatggtgctgaggcatgctgggaaatcctgatgtcgactctctgttgggggcactggttaaacatctacacatggcaccactttatactgacgatacatttttattctgtgagtattctccatgcccagaggaaagaggtttttgaaaccagccctttcagtatcactcagctcataaagacggagtctcctatagtccagctctctatctgatctaggctcgccaagtgaagaaagtaccaggaaggttttctgtgttccaacgttattggttaccccaggacatctgggccactgccttacccaagggaatagctcaactcatttgctgagtggttacagctgtggatggtgttgtggcagctgtggggacattaagctactggcagctgcagctgtggctatgaggccagactggctgccactgagtgttggaggagacaataggcacccgaggcagggcagccttggtgagacagtactgtcccaggccttggaaagctacacagggaggatgtgaccgtccagaagggagcaccagtcactgtgggcatgcctacattcacagctaccaatccaaggccctggggacacatctgcctccttttggaaagtggagtttcttcctgcctgctttgagctgttctgaaacaaagaaccctctgtaattatgttagtcagttaaaaacatgataagctacctactagtggaagccctccagttactcctagaaatctcactggaggcaaagcaatgacagaaatgaagtaaaatgcttgtgtgaaagccagctgttcacaaacgggctgtttctgacacaaccatgggccaagaagactcctttgaggcaaaaccaggcagccaatcacagaggtatctgtctggtccttcttacaggaccctcatggtcaaagcctgctggatgtctcctttggtatcatctgaattgcttctctgtgctaacaaatatgatctgaattccagtccagaaattaggttgcttatcatttctggcttctccccagaaggcatgaagactgaagtatctgtctttctacttcgacatagaatcgtggccatggcagtgctgtcctgagctgagtgcttaggactcgggtcacacactccgttagtcacctgcgttctttgaatactttatgtggcaacagggtttttccctttctcggctggcagcaccctaagcactgtgcgtgttcagagagcagccaagggaggaagagaacctggctcgcttaacctcctttaacaggaagctgctgacccacaaaccctatggaccctcatcacagcgcaaagatgattaacccccatgctgagcaggggcagtggcacggtggtgacattcacattctgtctgagtgtgacacactgagtttcgctcagcatagatgaggtgttgtgttatttacccagtttttaaattctaaaaacatattgtaccttggagacagtagctttctccaagctattattttttggctaaagagagcactctagtgtagcagtagagtaggatacaccaacgtgccctaaaagtaatgcgaagaacaggaatgtagaccctcctaactccagatagctcactggtactatttcattcttgctccaaaacacaggtgtgaaggtagaaacagacttctcggtccatttaatggttaacactgtaacgctgtgtgcatgtatgtatttatgtatgtataacatctaatatgtaacatataatatacaatatatacataacacacaacaataatatgtaacctgtaacatataacatataatatacaacatataatgtataatatataatagaaaatatatagcatacaatatataacataatttacaatgcaacatatattatatacatatatttatatatacataaatacataaatatataatatatgtataataatatatacatatatgttatatatacaactatataatatataaatatataactagagagagagaaagagagagagaagaaatgtgagggatgacatcattgcttgattcacgtagttttagaattgctcaccccatctttgctgtatctcatactctagaagaacacgtgtgtgtaatctatatgagtcgagactacattgcacccacgagtcaagtgcggcctctaaggacgtggcctggttctgccagtgtgagctccagaataaaagacaagaagaaaggtttaataattaaaggcattacatgcttgaccatgagggaggaggagacaggttttgaaactctgaatttgtgtgtgtgtgtgtgcgcgtgcgtgtgtgcatacatgtatatgtctatgtgcgtgcacacactaaacaatttctcaaatggtggagatcagtgttttactctctgatatctctgatagaagtgacgttatgaggactgtccccaagactctggcctctgggaggtcaggacaccacatttgtcacatttgtatgcatacttgggcatgcgtacatggacacacacacatttacacatagagccatacacacaacacactcaccacacactcacacagacatacacacaagcagatacatgggcatgaatacacacacataaacacacacactcacacacaggacatacatacaacatacacacttacacacaaggatatacacacaaatagatacacaggcacacacacacacacactcacacagatatacatacaagcagatacacaggcatacatacacagacacacagacacacacaggcatagacagatacatgtatgcacacacacattcacacaaacatacatacaagcagatacacaggcatacatacacagacacacacaggcatagacacatacatagacatatacatgtatgcacacacacacatataaacacaaccctaagaagcttgtacaggcacaaatagctaagcccatgtcctgagtttttattttaattggccagggatgtccacaaatacacacttctaacaggctcctgactgcagatgcagatctacatataccacactgaatggtccagagatactctggaccccgtttaacaactttttcaaaaggcacacaaggtgatttcctaggctcaagctctccgattggctccttgtctgtgtttagagtaaacaaaagtaaaacaacaaaaaattttcctgtgatttcccttccacactcaagccatgcctagtgctgtttgctaccctaggcatccgcagggactgtccttagcattgtgtccctgcagaagggcggcgtcccacccaactggactccagagctgtgctgctgtgtgattacaggtgaagcactgagtgctgcatccagccaattacgttgaggatgaatttgtgttgattttcccttaactctgaagactgttcattcacacacgacttcactgaactccacaattacctctggagatggctaaagacaataaatgggaccgggtagtgatggcgcacgtctttaatcccagcgctcgggagacagaggcaggcagatgtgtgagttcgaggccagcctggtctacagagtgagttccaggacagccagggctacacagagaaaccctgtctcgaaaaaaaacaaaaacaaaaacaaagcaaaataaaacaaacaacaaagacaataaatgggcttatcgatattcttcaaaggataacactagtacccaaagataaatatttgccctaaaagtcttacaaccaattgatttcttataacttagacgggaatgttgggttcttccctaaacatttgaaaccatgagacagaaaaaaaatattttagaaaagtaaatgaacccatttgatgtttggtatccagcaacagctgttgggcctcatgtgaatatatgctcataattctggagagcatatattataggttgctttcacacatgaaaacatgggttcccagcagggaaataaacatctagatcttacagtatttctcattggagatgatgagccatacttaggatctcttgtagatctaactgtgttccttgttgaaataatttgagcatagtttaggaatttagtttcatctgttgaaacaaatataaatgttgcaattgtattttttaaaaaagtctacttacatctgctcctccagtatccagttaccagcatggtaagaattatcccaaagctcatttgcaatggcaagaatccatcactgtcctgctttgcttcctaaagtggcttattatgttcagcagagagcaaaatgcatccccactctatgtttctgagttgatggctcaccataaaagaactgagtggaagccagcttaccgttcacatccaaccagcctgggcatcttgcagaaaagctttgaagtgactttatacaaaataacgtttaaggctgttgccttgtgttttcccaggcttttgtccgctaagagtctgttgctgggtcttctgagaggtgcaggttttcagctgatagaaacaaagtaggaggttggagttgccccaaaagttcttcagttgaaatcaaactaagagctaaacttggtggcttcttttcattttattattatttttttaatgtacgacacatgcgcatggcagaacattcatgcaataccgagaaagtgtctagtgaacaatgtggctcaacacccactccagttcctaaatctcccagtgtgtgttcatgagcaaatctctgtgatgagtctgagccatcttcagggataaatagcgcccagatatgaggcccaccagacaggcaaattggaagtccctgtgtcagtgttatctgacgaggtgtcaggattctagcgaatctggattctcttcaaggggatgcaaatgaaaaatcacgtttggaatattgtcatttggaaaaaggaaatgggttttgtcatgaggaatgcgagggatttggagacacccccacccccatttgaaaacacatcagcagccacagtggagcggagaagaaagagtacaacccagtagaaattctcaggcagaacattttattagaagcgaagtctctctggaagtttcgcttggattgtttttaaggattgctggtgctacttctaagtcacattgtgaaagtgcggagttagagtcgttacttagcaaacagaggaattgcagaactagctgtagcacggaccacctacgtgttcttgggtaacttactatccttccagagcgccagtgccaataaagtgagcatgatggtacctatatcatagacctgcttcatggggtagcacacaaaaacgtagccgccaaggttccacagcaccacctgtgttcagggagtagttggggcgtatcaactacctgtgttattgcttgtttggcagatgcatgtgaagtcagcaatatgagtgttttaaagttataaaagactagttaaataagaggtatttttatttacttgagcattaaataatatgcatatttttgctatgaatttaaataattattatacctgaaaagagtcttatttttaaagtctgtgatcccttcctcactttttaaagttgtctatgactgaacacacagttcaatctctgagaaatgtcagagagattcgatgttctcagccctggcatgcaaagctcctatcattgtgggtctctccagctctcctgggctctcggtgtcatttgcctatgtcagtgtgttctacctggtatgggagtctcataggaaggactcagataacagtctgttcccctttgctctgacaacgcatgatcaaccctttctgacacaggaactttaattgccgtatgccgctgtgtttctccaggcctctaaccctgggcagtttgaaaatgacagtgacgcactgtggcagcgaggacaagttccagaatccatcgtctgtcatgggcgagtaggaataaacacagacacacccgatgaagccctggttgtctgtggcaacatgaaagtgatggggactgtcatgcatccctctgacagccgagtgaaggagaacattcaggaggtgagcctggggtatggcacagggcccttcctcggacaccttaatcaggtgtctggtgttgtaatcataaaaagataaaggactataagattatgttctataggggtgtcgtgannnnnnnnnnnnnnnnnnnnaccagccacagaacagtatagtatagaatagagtttattcagggcatggggaggggagttaagagggtagtagaggcagagaaaggcagagagaaggagagagtagagaagcagaggctggccatgactgtgtggaggaggggggaaagggaatgaggagagagggggaacaagggggcaagaggcaagggagagaagcaggagtgagagagtaagagagagaataagagagggaggagggggcaagcagccccttttatagtgggccatgcctgcctggctgttgccaggtaactgtgggggtggagtccagacagaataccaacatctgggactcccagcctgacatgcgtggttccggggcatgtttatgtgtcacctgttggtgtgaaatgaacaagttgcttgaagataatggtgggtggaggtgtgggacatctctcctgcaagagatggctcagggttaagagcactgactgctcttccagaggtcctgagttcaattcccagcaaacacatggtggctcacaaccatctgtaatgggatctgatgtcattctggtgtgtctgaagagaacctcagtgtactctcaaacgttaaataaataattcagacatgtccttgcatctggccacaccagtggcttaggtggtctcaatcagaaggcttgtggaacatcacagtttgagaatgtcctccacaatcctggctgctatcaccaggcttatgcaggatttcagtttggctttccaaaagtcatcagttttgctcttttaaaagatttattgatttattatatgtgagtgcactgtagccattttcagacacaccagaagagggtatcctgatctcattacagatggttgtgagccaccatgtggnnnnnnnnnnnnnnnnnnnnnnnnnnnnnnnnnnnnnaatttggggcttgattaaagaagatacattgtcttaaataacatacttcccagagcctctcaaatccttctaggatgtgttctctgtataagcaacatgtcccctcatcctggactggaaatgagaaactcccctctcctgattctgctcacagcagcccaaggggataaagagaattgcagagttgggtaggagactggagatttatcctgacagcatcagctcaggacttcaccccagagatgtgctcagcttttgttttgcaatccatgtctagagaagactcagctatgagtattttaatccatgtcgatagcttcttctcagaccatatgtgtggaacactttttacctgtataaaactaagtagacaggagttttacttccattaaatacatatcagtaatgtgaggtgttaagaattatcttgtattagtattgccttctatccatatttgtgaaatggataggctcctatgacttctagctgtcccatttgccacttatctcagctgtgagatagatggcggtcatcattggtggcctcgtggatctgtgcacagcatccttgcctctctcactgactcagtttctccaaacttttaaggagagagccatgctttcagagtttctagaaggatcacagaccctttgtgctgctagaataagatgctgctgggtgatttatacacagtagaaatttatgactggtaatgctagaggctatctcaaggaatcccaagataaaggcactgacaggcttagtgtctgttgaaggctttggctagtggcatgccagggacgtgtgcagacaactgtcttcacatggtagaaagatggacacgtgcaggagaaagaggtgatcccctacaattttgatgtttgtttttaaacagaatcctatttgctaggtagatcaggctggtcttgaactcacagagatgggcctgcctctgccttccaaatgtagggaattgacttgtatatccatgctctactcctttagctcttttgtcaatgagcatagagacctcatgacttaacccccactgtggtgtattaaaatacttagggaaatgattgttttagctatctggggtcttttgttttaggatattttttcttatttctatgaggaatgttgtagggaatttgattgagattgcattgaatctgtaaattgcttttggtagaatcatcgttttcacaatattaattctgtcaacctatggccatgggaggtctttccattttctagaatcttcttcaacctctttatttggaggtttaaagtttccattgcagcggttcttccattccttggttaaggttgtttctaatcctttatttatttatttatttatttatttatttatgttattgaaaatagaataatttttctaatttctttcttagcaagttcattattcatatagaagaaagccatgatttttctatgttggtttctgcagtctgcaatgtaaatgaaagagttttctagaagagttggtagggtctttttctggtgtagaatcatgtgatttgtgaataaggataattttcattctttctactttaatccattttatagtgttcttctctctgtcggctgtggctaggattccgagcactgtactgaatgttagggggaacctttatctcatcccagaccttacaggaaatgttcccagtttcccccacttagacaatgctggctatacatctgttgtgtaacttttattgttctgaggtacactcaatttattcccaatgtgtctaagacgtttatcatgaaggcatattaaattctgtcaaatgtcctttctgtatctattgaggagacttgtgatttctgtaagtttattaattgtgtgttacacttattgatttgcatacactgaaccaatcctgcagacctgagatagagcccatttgtaatctttctatgctcttgaattcagtttgtgagtatttggctgagactctgcatctgttgtcacagggaaattggccttttgtatttaagctgtctttccgtctttatttgattttgggtatcaggataacgctggctttgtagaatagagttgatggttctctttctgctcttgattgatgctgttcccctaagctgttactttgtaacctttgaaggccagaaagggaaagtgacttttcctggatggctctggttacagtgtatccttgtgcttcctgggtcaggtttgcaaatctctctgagatcccaggagtcgtacctctctgcacagctgaacagtggatgctcattcaggtgggaccctgccacgatccttgctgtatctatggcagctgccctgataaagtctgcgacagcaggcagctacattgcttgctactgttcttcccagctatgcacgggtggagtggtgctgatgcagaagaaacaggcagtctgtgtggttgatggacactgcagatctctttgtggtagaaactcatggatgatacagcttctggaggcgttttgctggaggcattaaagttgacttggagagggcccaggccagcacaccatatcccaagtggccaatatggctgccatagccggtgccaagccagactttggaggaagttcactagagaatggtgcaaatgtgtgttcatcagtgggtcctgaggtgagaagcttatctgggcagtacagcagaaatgcccctcatacttcttcaactatactaatctacttacttagagacggcttctaatctgccatcttacccagaagtcactaagtgatgtatttctgactgtcaaaatgccattgatttcataatctagcagtattctaaaggaaaaatcagaggacatatgggaaagtggctggttatcttttaatcagaccaatatcattataattagatacagttgttttgtgaaattatcaaacaacccactccttcaaattaaaggggatcttttggagcaaacacttagttttagagattatatttactctcttgctatcagttttctggggaccagtaaattcctttgagaacttgacaatgacaattggggacatcattagacccaatagcaggggagaaggagatctatgctgacttgaaccctgagagacttggggagggaatacagagcaatccccggaaagaaactccatccagcaaactatccaaagtaactcaagagtgtggggtctgtccttacgagaggttgtctttgaactggcaatgcagttttagtttgtaaatagagcctgggtcacacacctgtggacacagttgaacaggacacctcagcatcctgaacagactctccaaagtgagaatcctggaacttttcagggaagacaagagcagtgtaggaggtacttccgccccgtaatttagactggaatctctggttctatttgttggagcagcggttctcaaccttcagaatgctttgaccctttaatacaattccttatgctgtggtgacccccccaaccataaaattattttcattgctacttcacaactgtcattttgctagtgttattaatcataatgtaaatatctatgtgttcccatggtcttttttttgaaggtcacaactcacaggttgagaaccattttggaggctggcagttaccagtggctttgacttccctggggagaaaattagaaatttctcatctgtcagtcttccctgcctctcagagtcacgcagcacattgttttgaataacaaatatctaaccaggtgaaatttgctctcttttaattaaaacaggttgacacaaatgaacagctgagaagaatagcccagatgaggattgttcagtacgactacaaacctgaatttgcatctgccatggggataaacactgcccatcaaacaggtacagacacagactcctcccttgactgtctgtggccggctatggagcttctccttgtctgttcaccctgagcttcattcgaaaataccctgcccatctaacacatgctttgagaggctcaccatcattgtaatggggggcggggagggaggctagagaatgtgtgggttacctttaacataacacccccacgttgcacacccaagttctgctagaagattttgaatatattgcttgtgaagtgagggttcaagggccaagaggaacagggattgtgtgaagcagggaaagggggtagggtgggggcggggctagacagtctagggatggagttgagagccaggtaaggctggctcacaacatcaacatcatcaccgcaaggacactccatgctcattccttagcctgggaatcctaaaactaagcgggaacactaaaggaccaacatctcctataggaacataatggactcaagctagcaatatgcgtccttctatgtttagggatgtgagggtacttattgacccttcacagcacccttctccccaactaggcagggactgaaagaatgagaaggcaggcggggaggaaaggaaggagtggagcacttctactttcaattctgcagtggttctcacctcaattatagatcaaagtgaaagctgaggtaaatgtctctttccaaagagtttccatggaacctgggtattccattctgatgtaggaaaccctgcaagcatttcccacacccccattaaccccgttggaatgttttgtgtgtaggaatgattgcccaagaggtgcaagagatcctgcccagagctgtgagagaggttggggatgtcaccggtggaaatggggagacactggagaacttcctcatggtggacaaggtaatcaattactccataggtgtctacagctagggctgtcgctcactgctacacccctctgcaggttacacaatgggcagacagtttacccagagacggggcttgaaaagaaccactcactgagctgtagagagaattggtaccaattatcatacaatatatttctgagatataacaacaacaacagcaacaataacaatgacaataggccccatggggaaaacgactgtgcagtgctcagaatttcttttcagcagggattactgaaggaaaacttgtctaaagcagagttcactctgcatggctgttctcaaaataaggtccagagagcatgggaaatcttaacgaaaagctcaaccgcaccttgtctttaaagacagaaaactatcaggggaggaaaggtgcagtggttagtggcacttgcgcatcttccagaggacccaggttcaatcccatgcatccacaagcatctgccatggcggtcctgccggtcctgtgctcacccagcacacagacatgcgtgggagcaaaatacacacatacacacaaaacaataaaataattaaaaataaagtaaaatgaaaacagaactatagcttataagaaaatacttctgttctataatacaaggaaaattatagcttttcaatatgctcctcagaataattaataattaaataaagtgttgaaattttttgcggggggggggggtttcttttgtgacgaggatgtgtttaaattccacaatagggccataaagtgggtcatttttacagtgcaattcccgagtctcatttgtttcaccaagggcttgtcttaattctttgatattcaaattgttctctgttgaaggatgctctcctggatctagattagcccccaccccccctcgctggatggctgtctaagtcaggcagtccctctcttggcaatacagcctgtgtgatttgaatagttctgtaataccacgtctgtcaatcttgtgatatcctgctcttttgcaaggctcacaaactacactgccgccggcttgaggtgtaccaagtaatttaggtatgaagaggaaaagccaattgccagagggattttttatttttatttatttatttatctatttatttatttatcttttagcaatgggcacagatgtttgagtggagactaattaatactttcttggttcatctgggagtgtgtctccaacttcagagtgcacgcagtccaccgggggtctcgctgaaatgcacgctctgatcgggtctatgacctctgcgtcagctcagtgcctgcctctgggctcccgcctggagtggagccctggtttctcttggatgtcgggctgtgagatgaaatgaaccctttcttttccagctggcttatggtcatggtgttttattacagtaacggaaactctaactaagacaaccttcccccttctccaggctctgtcctacccccttaaccacccaggcagacgcctcctgtctgcggcccctcattactagatgttttttctatcatcctgacacctacccagtatgcttctgccccagagctgtgggtgttttctgtcctaaagactcttcccacaggcgctctcacctggacttccctgcccaggtcatggttcatccagagcagtctctgcgccagatcactttctttgatgaggtccagggtcattccggggtgggtgtatagtgactttgcacagatctttctgtcctagtcagggtttctattcttgcacaaacatcagtgttacgttctgtctaagctctgccccacagttacctggcagcagccaggtaagcctgactgactataaaaggggctgcttgcccctcctccctctcttgctcttgcttccctgtctcttcccattcccttccctcctctctctccacacgatcatggccggcctcttctcctctacttctcttctcttctcttctcttnnnnnnnnnnnnnnnnnnnnnnnnnnnnnnnnnnnnnnnnnnnnnnnnnnnnnnnnnnnnnnnnnnnnnnnnnnnnnnnnnnnnnnnnnnnnnnnnnnnnnnnnnnnnnnnnnnnnnnnnnnnnnnnnnnnnnnnnnnnnnnnnnnnnnnnnnnnnnnnnnnnnnnnnnnnnnnnnnnnnnnnnnnnnnnnnnnnnnnnnnnnnnnnnnnnnnnnnnnnnnnnnnnnnnnnnnnnnnnnnnnnnnnnnnnnnnnnnnnnnnnnnnntctctccctctccttctccctttctctacctctactaccctctcaactcccctccccatgccctgaataaactctattctatactgtaccatcgtgtggctggtccttcaggggaaagggatgccttggcatgggcctgttgagacaccccctcccccatacctcagcacacctccataaagcatatcccccctctctttatctttttatacacataccaatcatgactaagaagcaagttggggaggaaagggtttattcatcttacacttctacattgctgttcatcactaaaggaagtctagactgaaactcacacaggataggatcctggaggcaggggctgatgcagaagctgtggagaaatgctgcttactgacttgcttcccctggcttgctcagcttgctttcttagagaacccaggactaccagcccagggatggcatcacccacaatgggccctcccacccttgatcactgagaaaatgccttacagctggatctcatggaggcatttcctcaagggaggatcctttctctgtgataacgccagcatgtgtcaagttgacacaaagccagccagtacacctacctatccctcaactggacctctctactgagaacagcatgcactctcgttcgaaacagcttggagggtatttgtacccgactgaaattatctgtagatttacttgttctctgtcagtctctctaaacagttgtgtgagagctgaaatctatatttttcaaaacgatttctctagtgctttattgtgattttctccctagggcttcaagcactgtaggaattgagcaatattgggagcccgagttaaggagttctgagatgttttggttgatgcagcctctacacagacttgggcttctgaaaaatgcagtctcgagtgtccatactatgggcctgccattccctgtctggaggccccgtgctgacaagtccagggtccaataagctgtcaatatcctggaaaagatttctttatattaacgttccatttctgaatctcactgaagggatggaaagtggttacttgcataacaacatctgaagaagtggttttctaggaaagatgagttcagattcccctcttgagatgtcaattgaacactcaagatgaaaacgttcagaaggctgcgtgggttgtgggactctggagagcagggaggaggtggtagcaaaagcatgaggatgccaagaaaggaaagatcgtggacgaaagtcacagatgagacgcccgtggccacgcctggcctgaggatagctttcctctcatagttttaaaaaaaacttgcaaatctgttgtctatatttaaaaatcagaaatcttctcatgattgttttagactctcgtctcctgtgaaatgccagatctggaaagatggggctgtggcgaagctctcagtaggggcttcgaactccatgtggcagcttcccactctctacgtggtaagcggcatgcagttgaggctatagcgtagccgttctcaaccttcctaactctgcgaccctttaatacagtttatcatgtcgtggtgatcctcaaccataaaattatttctttgctttttcataaccatcaattttctactgttatgaatcataacctaactatctgtgtatttctaatggtctcaggtaacccctgtgaaagggttggtttacttcccatcggggtcacgacccacaggttgagagccagtgctgtagacacagttgagaggatggggcaagtaaggaaaagatgtggtaaggacagcaccataagcccaagttacaaggaccagtaaggaagagggaggagggagatgtgatgggaggagggagctgtgatgggaggagggagatgtgatgggaggagggagatgtgatgggaagagggagatgcgatgggaggagggagatgtgatgggaggagggagatgtgatgggaggagggagatgctatgggaggagggagatttggtgggaggaaggagatttgatgggaggagggagatgctataggagggtctaactgggactaagctggcagtaagtactggatgcaggcagccttccctgctgtgaaacactgtctggccggatgtggcacttcacacctgtagtctcaacacttagaatgctgaggcaggaggatcacaagttttcagtctgcctagactgaatgcaactctatctcatcaaacaaaacaacctaccagactgttggctggtgctcgctcgtccatagcactaatgtgacatctgactttctaaattttgctattattattgagtgaaactgactttatctttctgtgattagtaagaactctgtggatctctttcctggagttgatacttagagtcctcctgtgaatttggtccagcagtctagtgatttatgagtcatgtgtgtgtgtgtgtgtgtgtgtgtgtgtgtgtgtatgtaggtgcatgcgtgtgtatgtaggtaggttatatttgtgtatgtgtatatgtatgtgtgtatgtatgtgtatataggtgtatgcacgtgtgtgtaggtgtgtgtatgtaggtgtatgtatgtagattgtgtgtatgtatgtgtgtaggtgtgtgtacgtagataggtgtatatgtgtatatgtgtgtatctatgtatgtatgtgtaggtatgtgtgtgtgtgtaggtgtatatatatatctgtatgtgtgtgtatgtgtgtatgtgtgtgtaggtgtatatgtgtgtatgtgtatatgtatgtgtgtgtaggtaggtgtatgtgtgtgtgtgtatgtaggtaggtgtatatgtgtgtgtgtgtaggtaagtgtatgtgtgtaggtgtgtgtatataggtgtatgtctgtgtgtgtgtatgtaggtatatatgtgtgtatgtatgtgtgtgtgtaggtatgtatatgtatgtaggtgtgtgtatatagatgtatatgtgtgtatgtgtatatgtatgtgtgtgtaggtaggtgtatgtgtgtgtaggtatgtgtatataggtgtgtgtgtgtgtaggtgtgtgtatgtaggtaggtgtatatgtgtgtatgtgtgtgtatgtttgtaggtatgtgtatataagtgtatgcctgtgtatgtgtgtgagtatgcaggtgtatatgtgtgtatgtatgtatgtgtgtgtaggtatatatatgtatgtaggtgtgtgtatataggtgtatgtgtgtgtatgtgtgtgtgtgtcagagagaggaggaggaggaaaagaaaacccttccatttgcctctgctattttattccttcctggtactctttaaaaaagaaaaagaaaggaaagctaactttcaagagctgtcctaatagctataggccgggatgatcattttccctctcagtggtttggcctccatcgcagtgctaacaacaccacacacaacaatgttaatctatgtgctttcttggctttattcttactaatggccgtctctccgctgaacagtgtactctgaaggcaggagctgtgtctgcctgctgagtcaggtttcttccctccagctgctgaggaacctccacgcctgacacagcctgagtgcgtgacgaggaggggctgattctgtgccagcagtggataagaaagtctgtggggtgtggggcagtcagtaaccgcacgcacgcttcccacggcacacacgtacacgcgtgggtgggaggggacagctgatcagggttggttctgttcttccaccgtgagggtcccagagcgtaaactcatctcagtggcccaggtgagcagctcgctgctgcttttctagcaaaggtggacgaccagacagcagctcatcttccctgagcttccttccccacttggtgctgattaactaatcacagcagaatgggacccagagctccccactgtggaatgagacacggtgaccacggtgaccacacattcacagcagaacagagctaagtaattgaatcaagttcagttgatttttgggggtggggggcaggggtgttttttgttttttagtttttttggtttctcaagacagggtttctctgtatagctctggctgtcctggaactcactctgtagaccaggctcaactcgaactcagaaacccgcctgcctctgcctcccgagtgctgggattaaaggcgtgccccaccacgcgcagctcaagttcagttgtttataaccaagggtgattatcaataagaaaacctttccaattgcttcagtgtagagtatatgctctcagcattaattaattcaaacctcgacatggagactagacgtgtctatgaagaaaacagtcccggagcatccagatagacattcctggtcaattactctcagtgagcctctgttatgagggtcaggggcgtttacagctatttttaaacatactgacaagtttcactgagatgctggacaaaagtcagaattttaagtcttctagccatagttgattgcaataaaagatcctagaaatttccgtaaagtcaggacaggccataattataagcagtaagaagtaataaattctccctgcatctttattacttctcaaataggaaaacatgtgaattatctccttgcctataggattcctacaagatctatggtgccaaaaactctgagctagagaaattagagctggccttttatcactattgacacataactaggcatatgcagcaattgcttatatctcctaagacaggcttagaaatcctctgggggaggcatggcgggaagagttgattagtagttaggagaggacctcaccattcttcactgcttgggttagagctaagtcacactgtgttgaggaaaaccttctctaaaaagaagcagagaaaggagcgggtgtgcagggcaggacatggtggagaaaaggggtggggtgggctgggcttgggagctgtaggagagtagattgcccgtgtgtgagtggagggggaagaggccagagaggatgaagggcaacgggatctgggcggctgaattggttatctactgaccacgtgacccgctgtaaacattccccttgttgtggcttaacgtcccctgtaatctaagcttagtgagtagcaatatgacacccacgatgtcttggaatcacggaatgctattcttatcttcattaactcctgccttagttttattaaacaaaaggaaagcctgaaccgtcattagaaaccttaaagcagtttctgtcagaagatcttttaatttttaaagaaaaaaaattttttaatgaatctctcctcctcccccatatcatcatcaccatcaccatcaccatcatcaccatcactgttattttggtgctgtgcatgtgagtgcagtggcccgagaaggccagaagtcagaggcatcagattccctctggtactagagttacaggcaacttcgagggaccacgtggctgccaggactcaaactcccatcctttgtaggagctgtgtgcacttctcgccactaagccctctctccagtgctccaaaatagttttaatgtacataaaattaaaatagtaattgtcttaattagggttttactgctgggaacagacaccatgaccaaggcaagtctcagaaaggaccacattcgacttggggctggcttacaggttcagaggttcagtccattatcatcatggcggcatgcaggcagatagggtgctggagaggtatctgagacttctacatctgaatctaaaggcggtaggaagagagaatgagccactgggcgtgtcttgagcttctaaaaaaaaaaaaagtcaaagcccacccacaatgacatacttcctccaatagaccacacccactccaacaaagccacacctcctgatagtaccactccctgtgagcccgtggggtgcatttttcattcaaaccaccacagaaatgaaacccacacccatcttcctcagagtccagagtatattaattattttttctcactcctgtaacacctgacggaatttacttaagggaggaagcatttattgtgactcaggtttagtacctggtggtggagtagctcatggcggcaagaatatgaggcagcgggagatgaggactcagactgcagctagcctgggctacacccctcaaaggctcatccccagtgacccacttctgaaagctctgtgcacagcccaagggtgacaacgtttcaatatagcactgcaatatccgcttttccgggataacatttgaaatgtaaaaaagaaaacaccccctctctcacacacacacacaaaagaccctatcctatgtccttccccctgcttctatgagtctgttcctcacccacccacccactcactccccacctccccgccctcgcattccatcaagctgtcacaggactaaggcctcttctctcactgatgcctgacaaggccaccctctgctacatatgcggctggagccatgggtccctctatgtgaattccttggtcggtggcttagtccctaggatatctaggaattctggttggttgatgttattcttcctatggggttgcaaaccccttcagctacttcggtccattctctaactcctccattgaggaggaccctgtgctcagttcaggggttggctacaagtccgcctacagagagcatctaagattccagttccaacctgctacaaatgcttatctttcttcaactcaattacttaaactgagtttcagagttatgtcattttattatagatactttatatctatatatgtctgtctatctgtgtgtgtgtgtgtgtgtgtgtgtgtgtgtgtgtgtaagtcataggtcagtcttggctatcattccttagagacagacgccatcaaccttgtttttttgaaacagggtctctcattggattgctgcttgctgtagagtgagtgtctgacaaagagtcctaggggttgcccgtctctgtctccctagagctagagtattaccgtgcctgcatgactttctctccccttaggttctgggtccctaacttacatctttgtgcttgcacaatcaaggctttacctgacgagctatcttcccagcctgatatctttttgaaggggaaggaccacttcttaaaaatggaactaccataccattaccatgtagaaaaaattaccaattatggtaaattttacgatagtcggggctgaaatttcacaaatgtttttgttttgttttgtttttatgtaaatttaacacgaaaggcatacagatgtccatatagtttgggcagccattaagaaacaattaaaaaattttctattacgttccatcatttggtggggttagcaaacaatgatattctgtcattctttctttggtcactggcattctattaaaacgaagaacatttcctcaccagatatatagttgacgtacagttgaggaagcgaaaggttcattcctttctttatttatgagtgttctgaaagagaaagttaaacctctaatgtcttctgaaggcaaccaataaaacatttttaaattgggtatagccagtgggtgcttttaaaacacatatgaccctttgatctactcccgaggtgtgccctttgatgtcctctggcctcttcaggggggtcctgcttactctgacacactcacagtcgtgggtggtcatcttctgctttgacagagaggtgtctgagctctctcttcatgtcctgcctgccccaaatctggggctattcctcctcacaagatccctggatcccttcagtgagcagtatttagagaccacaacgaacatgctcactgttagtgggtcagaaatgtctttttattatacttgatcatggttaaagataggaaatagtttccatctttgtagccttacaaagcagttaagattccagatggggttttcgtgtgggctgcatttggttggttttcggaccccactcccttagaatgtcctttcttttagtcacattgtgtcctttgctggtttcttggcctgtacccgtgtagccgcccacctgatctatgcatttaacaattagagggtagattcacacttgaatgagaatgtaaggtaaaataccacattatttaaaaggcaaatttatatatatatgcacataaataatatattacatataacatatataatgaagatttatttgaggatctggttttattcattttgcctgcctggcttcttttttcccagtatgtataaaatttttaaatgataacgtaaacaaaatatacgttttgaacttccccctcctatagacagtggatcacctgtgctgccttcttctcctctcacgatcacaggctttgctgcgcgtcagtacgagaaggtttcctcctccctcctaaagtgcagttgctgctgtgcagagctggcctccatccctgggcctctgctgacagtgtttgagtgtatgtcagtctctccccactatactgcattttcccagtcagtctagggaagagatttctggacatgggcatactggctcagaaaataagcacatgtggaattttgataggttaatgctaaattctgctccattgcatgttttgtcactagagtttttnnnnnnnnnnnnnnnnnnnnnnnnnnnnnnnnnnnnnnnnnnnnnnnnnnnnnnnnnnnnnnnnnnnnnnnnnnnnnnnnnnnnnnnnnnnnnnnnnnnnnnnnnnnnnnnnnnnnnnnnnnnnnnnnnnnnnnnnnnnnnnnnnnnnnnnnnnnnnnnnnnnnnnnnnnnnnnnnnnnnnnnnnnnnnnnnnnnnnnnnnnnnnnnnnnnnnnnnnnnnnnnnnnnnnnnnnnnnnnnnnnnnnnnnnnnnnnnnnnnnnnnnnnnnnnnnnatacacatatacatatacttacacactcacacacatgcatacataccctcccacatacacacactcacacacatatacacacactcacacatacatacacatacatacatatacatatacatacatactacatacatacacacatacacacattcatacacatatacacatacttacacatacatacacatatacccacactcacatatacacacacacatacccacactcacatatacacactcatacacatatacacatacttacacactcacacacatatatacacacacatactcacacacatacatacacacacactcaaacacacacccttaatgcaaacaagggcctcagagatgaacctcttggtcctttgtttcccaaagcttcctgcttttccaagctgctaacttggcacctctcaatttgcctgctgtcatttgctatttaacaaagagtcaacacaatggccgcccaccacagattctccatttgggtagggagatagcatgcaacctccaatatagacaaatggccaactgacaaaatcaggggcttccatagacctccttggttggctgggaattaagaggatctttcagtgcttctcaggacaaatgtgtccttaaaattgcacaaactgaacctaaaccttggaatattcagctctgcctgatcctctactgtattaccatgtatctatctacccgtatctatctaccatgtatctatctacccgtgtccacactgtattagcatatattcattgttcaaaataacaggtctcaccagttcatctccatgcctgcagatactatcctttgagtccccttttcagtgattgtttttcatggtttgaaacatgaaaatccccccccccccattacatcacagccataggtaaccttgagacattgacctcagggtcttcactgtatgggaacaggctgctctccctggaggagcaggccttgctttgaactttgaacttttgaaaagagagaagaaacggaggaacagtcttggggtcagggtgagatctgacaagagcttgccagtgcttttgattatggctaagatagtcacgtgtgttttaaacattctgtttgagagtcggattaaaatttgaattacacacagtcactccaggggtgttaaagaagataaactatctcaagaattattgtcacattcacaaatgaaaaagtggaagtctcaagacctcgtcacatttttacctggtggcagaactcagtgaaaaaccagggtctttagagtaatattgttgtctttattttatttttaaattttatcttggagatatggtctctctataaagcagaggttgggcatggaactcattggctagtccagattagctggaactcatgatcatcctcctgcctcagccttctggatgttggaattacagatgcacgccacaacaactggctaagtctccatcagagcctgaacaacttggtgcacattttatcaggggggagttgcagtcacttcataagggtgtttagcaatgaccacacaaatcagttcatggaagcctgttcccctttccttttttttttggtttttttgttttgttttgttttgtttttgtttttcaagacagggtttctctgtgtagccctggctgtcctggaactcactttgtagaccaggctggcctcaaactcagaaatccgcctgcctctgcctcctgagtgttgggattaaaggcgtgcgccaccatgcccagccccctttccttttttatgggcttaaaacatagcacagttgtcttaggggctatgtctttggacttcagactaacagcatccttcagttcattttccttacttctcttacaaagacatatttttattttattgcaaactgatcagaaaccatcttacagcccagctggcagtttgggtagcctgttctgagtttcgaaccacttcagacttctccagagtgaacttgaatttacggcggtatcgtctgcctttggatagtgcgcagacagttccctggtggccttaaactctgcagcgctctgcagtttgcattgtgttcccttccaggaccagatcttcatggagaatgtgggcgccgtgaagcagctgtgcaaactcaccaacaacctggaagaaagaatagaggagttagaaatatggaacaaaaagctggccaggctaaaacgcctcagtagcagctggaagtcctccatcagcgaagccagttccatcaggtacgttcagaagtttggggaaggcaaagggtgggttcctcccagaggagaccactctacctggccttgtggatgaagcaacacagctacactttcaggccctgaggttcgtagtcctgccttggaaagaattaggatgcaaacccctcctgactatctttgttaccttttttgttggtggttttaaaacgaaaccccaggactctgtttaagctcctggatcattagaggaaatgctaaatattagcaaaaacatgttttccccttcaaggagaagaggtggtcatttctaaatttgaaatgaaaaatcaattttgatttttgggggtgggggtgggtgaagttattttattggctgttcttagttcctaaggaattaaaagccatttcctgggctctagtttttgggtttttttaaaagacagaaataatgttaatgcaatcattaatgtttactaaagcccccactccaccccctacacaaaagaactccaattgctgtggcttttcttttttcaaattatcactgtcttacaaaaggaaggtcctactgctgagtttgacagcctgggccattgtcacatgcctcctagagaggcatttgaatagtaatcaattttctctctctctctcttaaagcaaattgagcagagctgttagtgcatcttcagccagaaggacaggttccaaaaagcccaccaaggtaaagagactgaaatgtaaatgaacggagatgctgttctctagaccaattgctgaaatgtaaatggaagttttagcctgcctcctgtggtagatctgtctcccagctactgggggatggggcatgggggagaaagaaggcatgtgaggtggaggcagaaagatggagagagcaaagcctgccttttgttagagcatggaatataaaatgagtttagcacgagccggggcaacattgtcagagtcttgtctcaaaatcaaaacacagaagacaggctgtgggagtagctcaccacagtagagcttgcctcacacatgagtggtcctgttttagatccacagtaacaagtaccacacatatacacatgcaaacactcaaacacattcacacacacacatgagtgcttgagcacacacacacatacacacatatacacccaggggcacacatgcaaatgcacaaacacaaacatgtgttcacacatatactgcacacacacacacgtgcactcgagcacacacacatatatacacccaggtgcatacatgcaaatgcacaaacacaaacacgtgttcagacacacactgcacaggtgcacacatgtaaacatacaaacacacacattcatacacactgcacacacacacacacacacacctgcacacacacaaacaggtttttagaggaattgatcagaaattggtctgtttccctcatttgcattctttggcaggtgtgttaatgactactaacaacaaaagagtcctaaacatgtccagaccacttcagacatgacctactagttattgtttacatgaacatcctctagtgaaccccatctcttaagaaaccccatccaacagccttcacatggaacatcaacatatacatgtagacatctttatacttgtatatgtatgtatgtatgtatgtatgtatgtatgtatgtatatatatatatcgctgtgagacatttattcctggggagacatgaacaaatatgtactcacctcagataaagaacccgtgacagaccaaaatatggataccacaaaagtccaacttgatgagccactgagttttaacggggttatacccgtatgggtgaggagctacttacagaagcaaacatgactcaaagacagctgcagcaccaaagcccaccccatcacgggtgtcagctcacagagctgggaacctggagcacacagcacacctgcaggcagcttagcaggtgggacagcatcctatccaggtggctctgtggttctgagccttttcccagcagctcaggtggtcttttgttcatctgctctggtcagagggctgggcttgtctgggtgtcttttgcagcttgtcatgtctgtgagagagtgtcactcagaggtgttactgattgtatactcaggacaggagcgacctagtgaatctggtcagttttgatggcttcctgagggtgttttaaagttttattttctatcttaaggagctttctctgtaggaagaaatgtttcagcagccgaggaaaatgcaggctctctgtctctgtctgtgtctctctgtctctgtctgtctgtctgtctgtctgtctctcacacacacacatatgcacacacatgcacatacacatacatgcacacacatacatgcacacacatgcacatacacatacatgcacatacatacatgcacacacatgcacatacaagtcttgaagccagagtttgagtgcaaacttgccagctttgtagtctgcagttttaaaccttgtgctctgtgacctacttgttctgtatgtaaaaaaggaggaactatcaggcaactgaggtattatgcaaaatgtctttatggcttatcaatgaatacatgagcatgtatgtgtgagaaacttggcctccctctgccttcttcttctgtctccaagtgtggattggatggtcatcttcctctaagcattgctgactgtgaggatgctatatgttggcattcgtgaagcatctactcagaatgcctggacacagcaaatgctgggcacacactcgtgattgcggttttttaagctttatttattatgtaaacaatggtttgcctgcatgtatgtatgcatgtatgccagaagatggcaccatctcgttacagatagttatgagccactatgtggttgctgggaatggaacccaggacctcttaaccactgagctgtctcttcagcccacactcatgattgttaatgtttcaaacccaccatctttgtggttcccatggtgtgtggcagaaatggtccagggattttgataaggtacaagcaatgacgctctggtcacccctgtgctgtcccagtagcactctctgtttctgtgacattgacttcccttgcctgtcactaggtgacctttgcttctagaggcctcctagggtcactgggtgcacctaggctaagtggtgactgcccatgatcaccatgctactggggacagctaacagacctccaggtgctaaggaacatgggtagggatggcacagctcttcctgctggacaagacacattctggagggagttgaggccacctcggtgtagtgctgatacaatcaataggaccacccttactcttctctacttcactcaggcatcctcaggacactcccagcgaggtgtaggaagggtgccgctcacggattgtgacttccagacttgcttccaatggcatcatggaagaacactttgttctaatagcctccaggcttgtgagctttttaaaaagtctaaggttcaacacttcccttttacactggagagcatgtttcttaaccagataacaagtccaagaagtaactaaagctatttcttagttgttctcattcctgtagaccctttggtcaaaatcatgattgttaagctccgtcctacagttacctgacaacagccaggtgtgcccgactcactataaaaggggctgcttgccccctcctctctctcttggtctcttgccttcttcctcccactctgtcctctcacccctttcccctctctccctattcccctccccccttcatgtgctcatggctggcctctacttctcttctcttctcttctcttctcttctcttctcttctcttctcttctcttctcttctcttctcttctcttccctctctctgatttcctgtctctactctctcaactcttctccccatgtcctgaataaactcttttctattctattgtatgtatgtgtgtatacatatatatatatacacacatgactggtgactgttatatttgtggctgttacctcagggggaagggatgcctcaccatgggcctgcagaggcacccccttcgcccatacctgactacacctccaccaaacatattacttctctccttatctttttataatatacaattccactctatagtgtgagaaggaaggaaacacagcactccctgttacttctttcccgttccccatgtgccagcttttatgtatctgctctaacatgtgtgtcattaccttcctagagacagtacttactgatttttatatcctctatggttgtgaatagcatcaatgagtaaatatccacttaatggctggaagaataaagatgacaagggcccagagctgtcttcattcataggtggggggatgggaccccatgcactgtaaggtctgcatgaaaggattctttcatatggcttccccaacatcctcctgtggggatttattccttcctatctggaggaacttggatctctccaagtctattaggaggctggtgtctggccttctttcataaaaaaccaagattgtctggcgggcaccagggaaaggactggccattgtagcctgcagcatgacgcagaggctctgaaggagattgtcctgttcagagaagcaagggtaaactgaggcaagtaagaagcagtccctggcctcgggaggcagcagagatccctgctgctcaggtctccaggcaccacagctgctgtgctgatctgtccctcttcatgaacctctcacaggtctcattctcaggaaggaagcagtcgtgtcctaactgggttttccagaccttggttgtagtgctgattgccgtgatggcattttggtaagagcaacttcagtgctgtgctggctccttctgtcttccgtgtctttctgagcttctctttgctttgaagacaaggaggttttgaaatcgggcactaaccttggatagcttaaggaggagggagcccttttgaaattcataacttgaagaaaagattaccggtttatgtactttgatttcttttcaattgtgatttaacagacgtacgtgtgtgtgtgtgtgtgtgtgtgtgtgtgtgtgtgatatttgtcttatctttgcacatagttttctcaggttctttgttttcctttctgtctacttgggagagaggggtgaggatgacatctggtaaagtcactgctgcctggccactgacatctgtcagcacattttgccttcttcactgaaagccttgcattaagagacaccaggaactgtgggaacatgttgatgcaatgaaaccaaagccctgactaagagagaaaccgtgaaaataagcaagggagcctgtggttgctgtgcctctgcatggaggtgggaggtaggggagggggaggaagaaataagggtggctgcagggtgggaatcaggagagactgggcacagagtggaaaaaagtgggagagagtgaaaggggaaggagtagaagtggttgtggaggggggagtggagaggagggagtagagaagagattgagggagagtggggaggaggggagaaagtggaggagggagtggggaagggagtagaagatggagttggagagaaagtggaggagggagtggggaagggagtagaagatggagtgggagagaaagtggaggggggagagaggagagagtggggaggagggagaaggggagaaagtggaggagagagtggggaagggagtggaagatggagtgggagagaaagtggaggagggagaggggacggaannnnnnnnnnnnnnnnnnnnnnnnnnnnnnnnnnnnnnnnnnnnnnnnnnnnnnnnnnnnnnnnnnnnnnnnnnnnnnnnnnnnnnnnnnnnnnnnnnnnnnnnnnnnnnnnnnnnnnnnnnnnnnnnnnnnnnnnnnnnnnnnnnnnnnnnnnnnnnnnnnnnnnnnnnnnnnnnnnnnnnnnnnnnnnnnnnnnnnnnnnnnnntcttctgctaggctccccagccagggagagggcaagtacctacttttagcagacatacttcatgtgctccagagatatcaccccggcttgtgtgtgaggaggtgagagggagtctagttctgagtgaagacactgtgtttaaagtctggttatcagatcttctgagcccagtgctgagcgccaggaccacaaacgggtggtaataaacctagtcctggtctctgttgtacctgagaagagtgaacaccagtttgccactggagagagcgtatgtctatttcatcctatacaccagaagccctctgacatgcgcattgaggcagatgtcaaacaggaattggggaaaggttttataattcatagtggaggggacagagagcgggaggcacaggaaaagcaagggacactggtccacagtgatcagctgccagggtgaaactaaaggctgtgtctgacacatctttaaatttagtaccacttttccagaaagaactgagtctgttgggcagccagcagctggctctcagaactctcttgtggaattcccttgtggcacatctctttgtctttaggactctaccttcttcctgggagaacaaagtactgaggaattcagtttagaaagcaaggtgtgaaatgaggctgacaaatggggcaagtcaggtggccttatttccagcaaacttctgggtgactcatatgagagtctaacagctctgtgcaaagaggaaggcaggcacacaggttcagatagcctaagcactgctgggattttgttattctgtagtcacatcatgtgcatgctttgttgcactgcctttcttccttctctctagctgatacattgtaccctgagagatcctgcagctgaccaaaggctttgcagtccctgcccaatctcagcctccttttatctcccagcttaacagcatggatgaacgccattgaaagtcaccagcaggaagcaaggttcatccttgctctttcctgccccgcctccagctgttgacaggcttcctcagttgacatcttgtcagggccaggggttggccctgtgaagggctccttcagcaaggagtaccctctgagccttcaaactctggggagtccagggctctttatcctgggcagaaaaacctaactgggctgtttccaaggtgtttctgccagctccagctgcctctctctcccttcctcccgtatgtgtggcctgtgagaacatctttagccagctggcagctcgactgagatagatgtagaaacaaacctaccgcataatgttttcccccctttaacagtgccttgacaatagttgccctctacatacttagcttaaaggatcaagaccggcgctccccaaatctccctctaaggtaagagatcttgtattcctttgagagaaggactttatatatatatatatatatatatatatatatatatatatatatatatatatattcttctctatgtgtatgtgggcgcctgaggaggccagaagagggccctggatcccctggagttggagttgcatgctgactgaattccctaacttgagggctgggaatcgaacctgggtcttctgcaagaacagcaagtgttcctaatctctgagccatgtctgcatccctgagggcccctaaccattttgtacccttccagcaatatgacaagctctccagagccagctctgtcctccacagctcctacctcaggtacagtcttcctgctcccagtgacaaacccaacccattctcccttgccacgtggctgtgccagcactttgagtgaccctcctgctctatgccttacagctccccatacaaccccggagaccacacagacctccctgcaagtgcccgaaatcactttctgtgagatcctgccgtgtcaggaaacttattgctgtcctgtgtggggaccaagaatattgttttcaagtcctgcacaaagacaactggaagcagagagagagatccatcagagacaatgggcaggtaaatggtgttcagagagaaacaagcagccctctggacccgaggttccccctggttgatatttacgtggatggtttgtgaatggagctaggcagtggctctgctgcttggcacagcaaaatcgttaaaaacataggcacgtggactgccaaccacctgaacagtgagtttcgtccccagggaggaaatgtgggtattatttgtaatcagaaaattttcattggtccaccaacaaagacggtgaggtcatcggtcatgtacacatgggttgggggtttgtttgtttttttgcacttgtgggatgtgtgtgtgtgtgtgtgtgtgtgtgtgttgtgtctcacttagaacttaaatgatgtagtgttggtgtagtgtctggactttctacactaatttgggaaagatacaggaaatgttgagaaacaaaggaaggaaggaaagagggaggaaagggggagaaaaaaggtgataagggaggagataaggaaggaagggagggagggagggagggaggnnnnnnnnnnnnnnnnnnnnttggaaaccctaacttgacaagtcagtcagtgaaaaccaccagcttggcgttccattttcagaagctttttttccttgtacacaccactattggttttgttcgtttatttggtatgtgcgtgtggtctatgcgcaaatgcatgtgagtgtacctgttcctgtgtggatgtgtggaggcagccttattttttgatagagtctctcactgaaggaagagctcactgactgactagattggctagcaggcaagctctcggaatttgtacacctctgcacacgtttctcctgtcccctccctaccccagtactggggcatgctgctgtgcctggctttttacacgggtgctggagatctgaactctggtctttctgcttacagacagacgctttatcaactgaactacctcactaggaccttttatttttttaatgttaaaaaaaaaaaagtttttagaaatttggtcaagggctccaagtggaattatctctgtaagatcaaatgcatttcttccaaatggattctaggttactgttttagaaatgtcattctgtttccacacagtaacaagtgtccaggatagcattagtaataacagctgcaccagcagtatgtactagtgtggttttaccaggatgttgctggagtaacaactcttaaatgatggggatgtaggatggcaatcatttacttctgattgcacatcaaatgtggatgaaaacagggctctggctggccacgttcaggacccagctggtggtgatcctgtgtcccggtgtttccataataactgtagtcacagtaagggaacaaatcacatcgtgccctgcctcctaaaactcccttctcaataggacatatgtcacttctgcttatacactaggacatatgtcacttctgcttacactctttggccaaagcaagtcatatagctcatatctggttcaaaatggttggaaggaatataaatctatcatgtgcctcaaaaaataaataactaaaagtactactattttgtgggttaaatggtgtcccatgtccactctgccacagagctagggtcacttgtggcaggacgagggagttttgactgcgctttttagatgaaggcctgctccattgctccctaaggtggatcctgaagagaagagacagtttatggttttaagacatttattatcgtggtaggaacttgatgagcaaaagccataccccactttctcagggcgggcctgaggttaaataccttttgcagggaggagtgtccgggaaggagagcttaatccgctaagcctttcaggcctttaggagcctcattaaaatggagatctgtcctgagtctagtggtctgtgattacatcctgtacctgcacagggatttggggcgttgcccttccgtgactgatggcgtcaggagcctgatgtccaggagtgtggcaaaacacctaccatcccttgctgggtttcctagctcaaccagaaaccaggctgcctttaacggtcctacactatttataagcagcttgg

SEQ ID NO: 2606 - DNA, 1062 bp, Mus musculus
gcctgaagtgggctatcaggttgtgacagacaaagggttcactttctcgccagtcgatgaagcttttgtttgtcaaaagaagaaccatttccagataaccgtccacatccaagtctggggaagtccgaagtttgttaagacccaagtgggcctaaagccaatagaaaagttttacttgaaagcttttggaattaaggtggaagccaccaaccaagtgattgccatagaacagtctcaagcagatagaagcaaaaagacttttgatcctgttaaaatcgacctcctgactgaccaggttaccaaagtgaccctgggacgattacactttagtgaaaccacagcaaacaacatgagaaagaaggggaagccgaatcctgatcagaggtacttcatgttggtggtcggattgtacgctgctaaccaagatcagttctacctgttggctgcccacatctctgaaaggatcatcgtaagggcctctaaccctgggcagtttgaaaatgacagtgacgcactgtggcagcgaggacaagttccagaatccatcgtctgtcatgggcgagtaggaataaacacagacacacccgatgaagccctggttgtctgtggcaacatgaaagtgatggggactgtcatgcatccctctgacagccgagtgaaggagaacattcaggaggttgacacaaatgaacagctgagaagaatagcccagatgaggattgttcagtacgactacaaacctgaatttgcatctgccatggggataaacactgcccatcaaacaggaatgattgcccaagaggtgcaagagatcctgcccagagctgtgagagaggttggggatgtcaccggtggaaatggggagacactggagaacttcctcatggtggacaaggaccagatcttcatggagaatgtgggcgccgtgaagcagctgtgcaaactcaccaacaacctggaagaaagaatagaggagttagaaatatggaacaaaaagctggccaggctaaaacgcctcagtagcagctggaagtcctccatcagcgaagccagttccatcag

SEQ ID NO: 2607 - protein, 348 aa, Mus musculus
  VARIANT (1)...(348): Xaa = Any Amino Acid
PEVGYQVVTDKGFTFSPVDEAFVCQKKNHFQITVHIQVWGSPKFVKTQVGLKPIEKFYLKAFGIKVEATNQVIAIEQSQADRSKKTFDPVKIDLLTDQVTKVTLGRLHFSETTANNMRKKGKPNPDQRYFMLVVGAANQDQFYLLAAHERIIVRNPGQFENDSDALWQRGQVPESIVCHGRVGINTDTPDEALVVCGNMKVMGTVMHPSDSRVKENIQEVDTNEQLRRIAQMRIVQYDYKPEFASAMGINTAHQTGMIAQEVQEILPRAVREVGDVTGGNGETLENFLMVDKDQIFMENVGAVKQLCKLTNNLEERIEELEIWNKKLARLKRLSSSWKSSISEASSIX
